(19) United States
(12) Patent Application Publication
(10) Pub. No.: US 2020/0131267 A1
(43) Pub. Date: Apr. 30, 2020

(54) ANTIBODIES

(71) Applicant: Kymab Limited, Cambridge (GB)

(72) Inventors: Joana de Abreu CARVALHO, Cambridge (GB); Rachael Jane KIMBER, Cambridge (GB); Jamie Ian CAMPBELL, Cambridge (GB); Nikole SANDY, Cambridge (GB); Cassandra VAN KRINKS, Cambridge (GB); Stephen John ARKINSTALL, Cambridge (GB); Volker GERMASCHEWSKI, Cambridge (GB); Ian KIRBY, Cambridge (GB); Miha KOSMAC, Cambridge (GB); Thomas GALLAGHER, Cambridge (GB); Matthew John MCCOURT, Cambridge (GB); Richard Charles Alfred SAINSON, Cambridge (GB); Mohammed Hanif ALI, Cambridge (GB); E-Chiang LEE, Cambridge (GB); Stephen Douglas GILLIES, Carlisle, MA (US)

(21) Appl. No.: 16/623,929

(22) PCT Filed: Jun. 20, 2018
(86) PCT No.: PCT/GB2018/051714

§ 371 Date: Dec. 18, 2019

(30) Foreign Application Priority Data
Jun. 20, 2017 (GB) 1709808.8

(51) Int. Cl. C07K 16/28; A61P 35/00; A61K 39/395

(52) U.S. Cl. CPC C07K 16/2803; C07K 16/2827; A61P 35/00; A61K 39/3955; A61K 2039/505; C07K 2317/31; C07K 2317/21; C07K 2317/92; C07K 2317/565

(57) ABSTRACT

The present invention relates to antibodies specific for one or more antigens, bispecific antibodies containing one or more domains with specificity to the target(s), and to immunocytokines. The present invention also provides methods of treatment, uses and pharmaceutical compositions comprising the antibodies, bispecific antibodies and immunocytokines.

### FIELD OF THE INVENTION

[0001] The present invention relates to antibodies specific for one or more antigens selected from anti-TIGIT, PD-L1 and ICOS, bispecific antibodies containing one or more domains with specificity to the target(s), and to immunocytokines comprising an anti-target antibody fused to a cytokine, such as IL-2. The present invention also provides methods of treatment, uses and pharmaceutical compositions comprising the antibodies, bispecific antibodies and immunocytokines.

[0002] Antibodies and methods of using the antibodies are described. In particular, antibodies that specifically bind human TIGIT, PD-L1 and/or ICOS antigen and their use in treating various diseases are described.

### INTRODUCTION

[0003] Immunocytokines (antibody-cytokine fusion proteins) were first reported in the literature in the early 1990s and consisted of whole antibody fusions with cytokines such as lymphotoxin (TNF-α) or interleukin 2 (IL-2). Subsequent studies in GD2-expressing tumour models in mice indicated that the ch14.18 antibody and ch14.18-IL2 immunocytokine both had anti-tumour activity but that the immunocytokine was far more potent than the antibody, even when combined with free IL-2, (see Sabzevari H et al., Proc. Natl. Acad. Sci. USA, 1994, 91:9626-30; Pancook J D, et al., Cancer Immunol. Immunother., 1996, 42:88-92; Becker J C, et al., Proc. Natl. Acad. Sci. USA, 1996, 93:2702-7). In addition, immune-competent mice treated with the immunocytokine, but not the antibody plus IL-2, developed an adaptive immune response dependent on CD8⁺ T-cells that prevented subsequent tumour challenge (Becker J C, et al., J. Exp. Med., 1996, 183:2361-6; Becker J C, et al., Proc. Natl. Acad. Sci. USA, 1996, 93:7826-31). Thus, the targeting of IL-2 to the tumour microenvironment induces an anti-tumour vaccine effect that is not possible with the antibody, either alone or together with the free cytokine. A related humanized immunocytokine, hu 14.18-IL2, achieved clinical proof of concept in relapsed non-bulky neuroblastoma as monotherapy where it induced a significant number of complete responses in patients with no other treatment options (see Shusterman et al., Journal of Clinical Oncology, 2010, 28(33), 4969-4975). A number of publications describe the ability of this molecule to activate several components of the immune system to kill tumour cells (particularly NK cells and CD8⁺ T-cells), and develop T-cell memory in order to resist subsequent tumour challenge (Yamane et al. 2009; Expert Opi, Investig. Drugs, 18(7): 991-1000; Neal et al., 2004, Clin. Cancer Res., 1010, 4839-4847).

[0004] As IL-2 based immunocytokines can have significant side effects, recent efforts have focused on the reduction of toxicity whilst maintaining efficacy. One example is Selectikine (EMD 521873), which has a substitution of aspartic acid for threonine at position 20 of IL-2, a key residue in the binding of IL-2Rβ (Gillies et al., Clinical Cancer Research, 2011, 17(11), 3673-3685). Selectikine, which binds necrotic tissue, has been shown to have good anti-tumour activity, despite its selectivity for the high affinity IL-2R, over the intermediate IL-2R and good tolerability in Phase I studies (Laurent et al., Journal of Translational Medicine, 2013, 11(1), 5. http://doi.org/10.1186/1479-5876-11-5)

[0005] WO2012/178137 (Gillies) and an associated journal article (Gilles, Protein Engineering, Design and Selection, 2013, 26(10), 561-569) describe light chain immunocytokine fusions with tumour targeting antibodies, and modulation of IL-2 activity by the introduction of truncations in the N-terminal part of the cytokine, which decreases signalling through IL-2Rβγ. IL-2 fusion proteins that specifically target IL-2Nβγ have been shown to have increased toxicity compared with wild-type (Vasquez-Lombardi et al. Nat Comm, 2017, DOI: 10.1038/ncomms15373), supporting the notion that decreasing IL-2Rβγ binding may be beneficial in terms of side effects.

[0006] An adaptive immune response involves activation, selection, and clonal proliferation of two major classes of lymphocytes termed T-cells and B-cells. After encountering an antigen, T-cells proliferate and differentiate into antigen-specific effector cells, while B-cells proliferate and differentiate into antibody-secreting cells. T-cell activation is a multi-step process requiring several signalling events between the T-cell and an antigen-presenting cell (APC). For T-cell activation to occur, two types of signals must be delivered to a resting T-cell. The first type is mediated by the antigen-specific T-cell receptor (TcR), and confers specificity to the immune response. The second signal, a costimulatory type signal, regulates the magnitude of the response and is delivered through accessory receptors on the T-cell.

[0007] A primary costimulatory signal is delivered through the activating CD28 receptor upon engagement of its ligands B7-1 or B7-2. In contrast, engagement of the inhibitory CTLA-4 receptor by the same B7-1 or B7-2 ligands results in attenuation of a T-cell response. Thus, CTLA-4 signals antagonize costimulation mediated by CD28. At high antigen concentrations, CD28 costimulation overrides the CTLA-4 inhibitory effect. Temporal regulation of the CD28 and CTLA-4 expression maintains a balance between activating and inhibitory signals and ensures the development of an effective immune response, while safeguarding against the development of autoimmunity.

[0008] Programmed death-1 (PD-1) is a 50-55 kDa type I transmembrane receptor that is a member of the CD28 family. PD-1 is involved in the regulation of T-cell activation and is expressed on T-cells, B cells, and myeloid cells. Two ligands for PD-1, PD ligand 1 (PD-L1) and ligand 2 (PD-L2) have been identified and have co-stimulatory features.

[0009] Programmed cell death 1 ligand 1 (PD-L1), also known as cluster of differentiation (CD274) or B7 homolog 1 (B7-H1), is a member of the B7 family that modulates activation or inhibition of the PD-1 receptor. The open reading frame of PD-L1 encodes a putative type 1 transmembrane protein of 290 amino acids, which includes two extracellular Ig domains (a N-terminal V-like domain and a Ig C-like domain), a hydrophobic transmembrane domain and a cytoplasmic tail of 30 amino acids. The 30 amino acid intracellular (cytoplasmic) domain contains no obvious signalling motifs, but does have a potential site for protein kinase C phosphorylation.

[0010] The complete amino acid sequence for PD-L1 can be found in NCBI Reference Sequence: NP_054862.1 (SEQ ID NO: 1), which refers to many journal articles, including, for example, Dong, H., et al. (1999), “PD-L1, a third member of the B7 family, co-stimulates T-cell proliferation and interleukin-10 secretion,” Nat. Med. 5 (12), 1365-1369. The PD-L1 gene is conserved in chimpanzee, Rhesus monkey, dog, cow, mouse, rat, chicken, and zebrafish. The murine form of PD-L1 bears 69% amino acid identity with the human form of PD-L1, and also shares a conserved structure.

[0011] In humans, PD-L1 is expressed on a number of immune cell types including activated and anergic/exhausted T-cells, on naive and activated B-cells, as well as on myeloid dendritic cells (DC), monocytes and mast cells. It is also expressed on non-immune cells including islets of the pancreas, Kupffer cells of the liver, vascular endothelium and selected epithelia, for example airway epithelia and renal tubule epithelia, where its expression is enhanced during inflammatory episodes. PD-L1 expression is also found at increased levels on a number of tumours including, but not limited to breast (including but not limited to triple negative breast cancer and inflammatory breast cancer), ovarian, cervical, colon, colorectal, lung, including non-small cell lung cancer, renal, including renal cell carcinoma, gastric, oesophageal, bladder, hepatocellular cancer, squamous cell carcinoma of the head and neck (SCCHN) and pancreatic cancer, melanoma and uveal melanoma.

[0012] PD-1/PD-L1 signalling is believed to serve a critical non-redundant function within the immune system by negatively regulating T-cell responses. This regulation is involved in T-cell development in the thymus, in regulation of chronic inflammatory responses and in maintenance of both peripheral tolerance and immune privilege. It appears that upregulation of PD-L1 may allow cancers to evade the host immune system and, in many cancers, the expression of PD-L1 is associated with reduced survival and an unfavourable prognosis. Therapeutic monoclonal antibodies that are able to block the PD-1/PD-L1 pathway may enhance anti-tumoural immune responses in patients with cancer. Published clinical data suggest a correlation between clinical responses with tumoural membranous expression of PD-L1 (Brahmer et al., Journal of Clinical Oncology, 2010, Topalian et al., NEJM, 2012) and a stronger correlation between lack of clinical responses and a lack of PD-L1 protein localized to the membrane (Brahmer et al., Journal of Clinical Oncology, 2010, Topalian et al., NEJM, 2012). Thus, PD-L1 expression in tumours or tumour-infiltrating leukocytes (Herbst R S, et al., “Predictive correlates of response to the anti-PD-L1 antibody MPDL3280A in cancer patients”, Nature, 2014, Nov. 27, 515(7528):563-7, doi: 10.1038/nature14011) is a candidate molecular marker for use in selecting patients for immunotherapy, for example, immunotherapy using anti-PD-L1 antibodies. Patient enrichment based on surface expression of PD-L1 may significantly enhance the clinical success of treatment with drugs targeting the PD-1/PD-L1 pathway. There is also evidence of an on-going immune response, such as the tumour infiltrating CD8⁺ T-cells, or the presence of signature of cytokine activation, such as IFNγ.

[0013] Further evidence of PD-L1 expression and correlation to disease will emerge from the numerous ongoing clinical trials. Atezolizumab is the most advanced, and recent data from Phase II trials shows therapeutic effects in metastatic urothelial carcinoma and NSCLC, particularly in patients with PD-L1⁺ immune cells in the tumour microenvironment (see Fehrenbacher et al., 2016, The Lancet, http://doi.org/10.1016/50140-6736(16)00587-0; Rosenberg et al., 2016, The Lancet, http://doi.org/10.1016/S0140-6736(16)00561-4). Recent results from a Phase III trial of 1225 patients with NSCLC showed improved survival in patients taking atezolizumab, compared with chemotherapy, regardless of tumour expression of PD-L1 (Rittmeyer et al., 2017, The Lancet, 389(10066), 255-265).

### SUMMARY OF THE INVENTION

### Antibodies

[0014] Disclosed herein are antibodies and antigen binding fragments thereof that specifically bind to PD-L1. In one embodiment, the antibody or antigen binding fragment thereof specifically binds to surface expressed PD-L1.

[0015] In a first configuration, there is provided an antibody or a fragment thereof, that specifically binds to hPD-L1 as defined by Seq ID No:1, and competes for binding to said hPD-L1 with the antibody 1D05, wherein the antibody or fragment comprises a V_{H} domain which comprises a CDRH3 comprising the motif X₁GSGX₂YGX₃X₄FD, wherein X₁, X₂ and X₃ are independently any amino acid, and X₄ is either present or absent, and if present, may be any amino acid.

[0016] In a second configuration, there is provided an antibody or a fragment thereof which specifically binds to hPD-L1, and competes for binding to said hPD-L1 with the antibody 1D05, wherein the antibody or fragment comprises a V_{H} domain which comprises the CDRH3 sequence of SEQ ID NO:29 or 32, or the CDRH3 sequence of SEQ ID NO:29 or 32 comprising 6 or fewer amino acid substitutions.

[0017] In a third configuration, there is provided an antibody or fragment thereof which specifically binds to an epitope that is identical to an epitope to which the antibody 1D05 specifically binds.

[0018] In a fourth configuration, there is provided an antibody or fragment thereof which competes for binding to hPD-L1 with the antibody 1D05.

[0019] In a fifth configuration, there is provided a bispecfic antibody or fusion protein comprising an antibody or fragment thereof as defined in any other configuration, embodiment or concept.

[0020] In a sixth configuration, there is provided an antibody or fragment as defined in any other configuration, embodiment or concept for use in treating or preventing a hPD-L1-mediated disease or condition.

[0021] In a seventh configuration, there is provided the use of an antibody or fragment as defined in any other configuration, embodiment or concept in the manufacture of a medicament for administration to a human for treating or preventing a hPD-L1 mediated disease or condition in the human.

[0022] In an eighth configuration, there is provided a method of treating or preventing a hPD-L1 mediated disease or condition in a human, comprising administering to said human a therapeutically effective amount of an antibody or fragment as defined in any other configuration, embodiment or concept, wherein the hPD-L1 mediated disease or condition is thereby treated or prevented.

[0023] In a ninth configuration, there is provided a pharmaceutical composition comprising an antibody of fragment as defined in any other configuration, embodiment or concept and a pharmaceutically acceptable excipient, diluent or carrier.

[0024] In a tenth configuration, there is provided a kit comprising a pharmaceutical composition comprising an antibody of fragment as defined in any other configuration, embodiment or concept and a pharmaceutically acceptable excipient, diluent or carrier.

[0025] In an eleventh configuration, there is provided a method of modulating PD-1/PD-L1 interaction in a patient, comprising administering an effective amount of an antibody or fragment as defined in any other configuration, embodiment or concept to said patient.

[0026] In a twelfth configuration, there is provided a method of inhibiting PD-L1 activity in a patient, comprising administering an effective amount of an antibody or fragment as defined in any other configuration, embodiment or concept to said patient.

[0027] In a thirteenth configuration, there is provided a method of treating a proliferative disease in an animal (e.g. a human), comprising administering an effective amount of an antibody or fragment as defined in any other configuration, embodiment or concept to said patient.

[0028] In a fourteenth configuration, there is provided a method of detecting PD-L1 expression in a sample, comprising contacting the sample with an antibody or fragment as defined in any other configuration, embodiment or concept.

[0029] In a fifteenth configuration, there is provided a method comprising contacting a biological sample with an antibody or fragment as defined in any other configuration, embodiment or concept to form a complex with PD-L1 present in the sample and measuring the presence, absence or level of the complex in the biological sample.

[0030] In a sixteenth configuration, there is provided a method of detecting PD-L1 expression in a sample, comprising contacting the sample with an antibody or fragment as defined in any other configuration, embodiment or concept.

[0031] In a seventeenth configuration, there is provided a method comprising contacting a biological sample with an antibody or fragment as defined in any other configuration, embodiment or concept to form a complex with PD-L1 present in the sample and measuring the presence, absence or level of the complex in the biological sample.

[0032] In a eighteenth configuration, there is provided a method for identifying binding partners for PD-L1, the method comprising immunoprecipitating an intact protein complex comprising PD-L1 using an antibody or fragment as defined in any other configuration, embodiment or concept.

[0033] In a nineteenth configuration, there is provided a method of diagnosing a disease in a human subject associated with altered PD-L1 expression comprising the steps of contacting a biological sample from the human subject with an antibody as defined in other configuration, embodiment or concept to form a complex between the antibody and PD-L1 present in the sample; and detecting the amount of the complex.

[0034] In a twentieth configuration, there is provided a nucleic acid that encodes the CDRH3 of an antibody or fragment as defined in any other configuration, embodiment or concept.

[0035] In a twenty-first configuration, there is provided a nucleic acid that encodes a VH domain and/or a VL domain of an antibody or fragment as defined in any other configuration, embodiment or concept.

[0036] In a twenty-second configuration, there is provided a vector comprising the nucleic acid of any other configuration, embodiment or concept; optionally wherein the vector is a CHO or HEK293 vector.

[0037] In a twenty-third configuration, there is provided a host comprising the nucleic acid of any other configuration, embodiment or concept or the vector of any other configuration, embodiment or concept.

### Immunocytokines

[0038] In a first configuration, there is provided an immunocytokine comprising an immunoglobulin heavy chain and an immunoglobulin light chain, wherein the heavy chain comprises in N- to C-terminal direction:
[0039] a) A V_{H} domain comprising CDRH1, CDRH2 and CDRH3; and
[0040] b) A heavy chain constant region;
[0041] and wherein the light chain comprises in N- to C-terminal direction:
[0042] c) A V_{L} domain comprising CDRL1, CDRL2 and CDRL3;
[0043] d) A light chain constant region, (CL);
[0044] e) Optionally, a linker, (L); and
[0045] f) An IL-2 cytokine;
[0046] wherein the V_{H} domain and V_{L} domain are comprised by an antigen-binding site that specifically binds to hPD-L1 as defined by Seq ID No:1, and competes for binding to said hPD-L1 with the antibody 1D05; and

[0047] wherein the immunocytokine comprises a V_{H} domain which comprises a CDRH3 comprising the motif X₁GSGX₂YGX₃X₄FD, wherein X₁, X₂ and X₃ are independently any amino acid, and X₄ is either present or absent, and if present, may be any amino acid.

[0048] In a second configuration, there is provided an immunocytokine comprising an immunoglobulin heavy chain and an immunoglobulin light chain, wherein the heavy chain comprises in N- to C-terminal direction:
[0049] a) A V_{H} domain comprising CDRH1, CDRH2 and CDRH3; and
[0050] b) A heavy chain constant region;
[0051] and wherein the light chain comprises in N- to C-terminal direction:
[0052] c) A V_{L} domain comprising CDRL1, CDRL2 and CDRL3;
[0053] d) A light chain constant region, (C_{L});
[0054] e) Optionally, a linker, (L); and
[0055] f) An IL-2 cytokine;

[0056] wherein the V_{H} domain and V_{L} domain are comprised by an antigen-binding site that specifically binds to hPD-L1, and competes for binding to said hPD-L1 with the antibody 1D05, wherein the antibody or fragment comprises a V_{H} domain which comprises the CDRH3 sequence of SEQ ID NO:29 or 32, or the CDRH3 sequence of SEQ ID NO:29 or 32 comprising 6 or fewer amino acid substitutions.

[0057] In a third configuration, there is provided an immunocytokine comprising an immunoglobulin heavy chain and an immunoglobulin light chain, wherein the heavy chain comprises in N- to C-terminal direction:
[0058] a) A V_{H} domain comprising CDRH1, CDRH2 and CDRH3; and
[0059] b) A heavy chain constant region;
[0060] and wherein the light chain comprises in N- to C-terminal direction:
[0061] c) A V_{L} domain comprising CDRL1, CDRL2 and CDRL3;
[0062] d) A light chain constant region, (C_{L});
[0063] e) Optionally, a linker, (L); and
[0064] f) An IL-2 cytokine;
[0065] wherein the V_{H} domain and V_{L} domain are comprised by an antigen-binding site that specifically binds to hPD-L1; and
[0066] wherein the V_{H} domain comprises a CDRH3 of from 12 to 20 amino acids and which is derived from the recombination of a human V_{H} gene segment, a human D gene segment and a human J_{H} gene segment, wherein the human J_{H} gene segment is IGHJ5 (e.g. IGHJ5*02).

[0067] In a fourth configuration, there is provided an immunocytokine comprising an immunoglobulin heavy chain and an immunoglobulin light chain, wherein the heavy chain comprises in N- to C-terminal direction:
[0068] a) A V_{H} domain comprising CDRH1, CDRH2 and CDRH3; and
[0069] b) A heavy chain constant region;
[0070] and wherein the light chain comprises in N- to C-terminal direction:
[0071] c) A V_{L} domain comprising CDRL1, CDRL2 and CDRL3;
[0072] d) A light chain constant region, (C_{L});
[0073] e) Optionally, a linker, (L); and
[0074] f) An IL-2 cytokine;

[0075] wherein the V_{H} domain and V_{L} domain are comprised by an antigen-binding site that specifically binds to an epitope that is identical to an epitope to which the antibody 1D05 specifically binds.

[0076] In a fifth configuration, there is provided an immunocytokine comprising an immunoglobulin heavy chain and an immunoglobulin light chain, wherein the heavy chain comprises in N- to C-terminal direction:
[0077] a) A V_{H} domain comprising CDRH1, CDRH2 and CDRH3; and
[0078] b) A heavy chain constant region;
[0079] and wherein the light chain comprises in N- to C-terminal direction:
[0080] c) A V_{L} domain comprising CDRL1, CDRL2 and CDRL3;
[0081] d) A light chain constant region, (C_{L});
[0082] e) Optionally, a linker, (L); and
[0083] f) An IL-2 cytokine;

[0084] wherein the V_{H} domain and V_{L} domain are comprised by an antigen-binding site which competes for binding to hPD-L1 with the antibody 1D05.

[0085] In a sixth configuration, there is provided an immunocytokine as defined in any other configuration, embodiment or aspect for use in treating or preventing a hPD-L1-mediated disease or condition.

[0086] In a seventh configuration, there is provided the use of an immunocytokine as defined in any other configuration, embodiment or aspect in the manufacture of a medicament for administration to a human for treating or preventing a hPD-L1 mediated disease or condition in the human.

[0087] In an eighth configuration, there is provided a method of treating or preventing a hPD-L1 mediated disease or condition in a human, comprising administering to said human a therapeutically effective amount of an immunocytokine as defined in any other configuration, embodiment or aspect, wherein the hPD-L1 mediated disease or condition is thereby treated or prevented.

[0088] In a ninth configuration, there is provided a pharmaceutical composition comprising an immunocytokine as defined in any other configuration, embodiment or aspect, and a pharmaceutically acceptable excipient, diluent or carrier.

[0089] In a tenth configuration, there is provided a kit comprising a pharmaceutical composition comprising an immunocytokine as defined in any other configuration, embodiment or aspect, and a pharmaceutically acceptable excipient, diluent or carrier.

[0090] In an eleventh configuration, there is provided a nucleic acid that encodes a heavy chain and/or a light chain of an immunocytokine as defined in any other configuration, embodiment or aspect.

[0091] In a twelfth configuration, there is provided a vector comprising the nucleic acid that encodes a heavy chain and/or a light chain of an immunocytokine as defined in any other configuration, embodiment or aspect.

[0092] In a thirteenth configuration, there is provided a host comprising the nucleic acid of any other configuration, embodiment or aspect or the vector as defined in any other configuration, embodiment or aspect.

### Anti-ICOS Bispecific Antibodies

[0093] In a first configuration, there is provided a multispecific antibody (e.g. bispecific antibody or a dual-binding antibody) which binds (and optionally has specificity for) ICOS (e.g. human ICOS) and another target antigen.

[0094] In a second configuration, there is provided a composition comprising a multispecific, bispecific or dual-binding antibody as described herein and a pharmaceutically acceptable excipient, diluent or carrier.

[0095] In a third configuration, there is provided a multispecific, bispecific or dual-binding antibody as described herein for use in treating or preventing a disease or condition, selected from neurological disease, neoplastic or non-neoplastic disease, chronic viral infections, and malignant tumours; such as melanoma, Merkel cell carcinoma, non-small cell lung cancer (squamous and non-squamous), renal cell cancer, bladder cancer, head and neck squamous cell carcinoma, mesothelioma, virally induced cancers (such as cervical cancer and nasopharyngeal cancer), soft tissue sarcomas, haematological malignancies such as Hodgkin's and non-Hodgkin's disease and diffuse large B-cell lymphoma (for example melanoma, Merkel cell carcinoma, non-small cell lung cancer (squamous and non-squamous), renal cell cancer, bladder cancer, head and neck squamous cell carcinoma and mesothelioma or for example virally induced cancers (such as cervical cancer and nasopharyngeal cancer) and soft tissue sarcomas).

[0096] In a fourth configuration, there is provided a use of a multispecific, bispecific or dual-binding antibody as described herein in the manufacture of a medicament for administration to a human for treating or preventing a disease or condition in the human selected from neurological disease, neoplastic or non-neoplastic disease, chronic viral infections, and malignant tumours, such as melanoma, Merkel cell carcinoma, non-small cell lung cancer (squamous and non-squamous), renal cell cancer, bladder cancer, head and neck squamous cell carcinoma, mesothelioma, virally induced cancers (such as cervical cancer and nasopharyngeal cancer), soft tissue sarcomas, haematological malignancies such as Hodgkin's and non-Hodgkin's disease and diffuse large B-cell lymphoma (for example melanoma, Merkel cell carcinoma, non-small cell lung cancer (squamous and non-squamous), renal cell cancer, bladder cancer, head and neck squamous cell carcinoma and mesothelioma or for example virally induced cancers (such as cervical cancer and nasopharyngeal cancer) and soft tissue sarcomas).

[0097] In a fifth configuration, there is provided a method of treating or preventing a disease or condition selected from neurological disease, neoplastic or non-neoplastic disease, chronic viral infections, and malignant tumours, such as melanoma, Merkel cell carcinoma, non-small cell lung cancer (squamous and non-squamous), renal cell cancer, bladder cancer, head and neck squamous cell carcinoma, mesothelioma, virally induced cancers (such as cervical cancer and nasopharyngeal cancer), soft tissue sarcomas, haematological malignancies such as Hodgkin's and non-Hodgkin's disease and diffuse large B-cell lymphoma (for example melanoma, Merkel cell carcinoma, non-small cell lung cancer (squamous and non-squamous), renal cell cancer, bladder cancer, head and neck squamous cell carcinoma and mesothelioma or for example virally induced cancers (such as cervical cancer and nasopharyngeal cancer) and soft tissue sarcomas) in a human, comprising administering to said human a therapeutically effective amount of a multispecific, bispecific or dual-binding antibody as described herein, wherein the disease or condition is thereby treated or prevented.

[0098] In a sixth configuration, there is provided a nucleic acid that encodes a heavy chain and/or a light chain of a multispecific antibody as described herein.

[0099] In a seventh configuration, there is provided a vector comprising the nucleic acid that encodes a heavy chain and/or a light chain of a multispecific antibody as described herein.

### Anti-TIGIT Antibodies, Fragments & Immunocytokines

[0100] In a first configuration, there is provided an antibody or fragment which specifically binds to TIGIT (T cell immunoreceptor with Ig and ITIM domains) and comprises a V_{H} domain which comprises a CDRH3 sequence selected from
[0101] (a) SEQ ID NO: 599, 602, 619, 622, 639, 642, 659, 662 or said selected CDRH3 sequence comprising 3, 2 or 1 amino acid substitution(s); or
[0102] (b) the CDRH3 sequence of an antibody selected from the group consisting of KY01-KY23, or wherein the CDRH3 sequence of said V_{H} domain comprises 3, 2 or 1 amino acid substitution(s) compared to the CDRH3 sequence of an antibody selected from the group consisting of KY01-KY23.

[0103] In a second configuration, there is provided an antibody or fragment (optionally according to any preceding Statement), comprising one or more TIGIT binding sites, wherein each binding site specifically binds to TIGIT and comprises a V_{H} domain and a V_{L} domain, wherein
[0104] (a) The V_{H} domain is according to Statement 4(ix) and the V_{L} domain is according to Statement 9(XIII);
[0105] (b) The V_{H} domain is according to Statement 4(x) and the V_{L} domain is according to Statement 9(XIV);
[0106] (c) The V_{H} domain is according to Statement 4(xi) and the V_{L} domain is according to Statement 9(XV);
[0107] (d) The V_{H} domain is according to Statement 4(xii) and the V_{L} domain is according to Statement 9(XVI);
[0108] Wherein Staments 4 and 9 are discussed further below.

[0109] In a third configuration, there is provided
[0110] An anti-TIGIT antibody or fragment thereof which specifically binds to an epitope that is identical to an epitope to which the antibody KY01 specifically binds.
[0111] An anti-TIGIT antibody or fragment thereof which specifically binds to an epitope that is identical to an epitope to which the antibody KY02 specifically binds.
[0112] An anti-TIGIT antibody or fragment thereof which specifically binds to an epitope that is identical to an epitope to which the antibody KY03 specifically binds.
[0113] An anti-TIGIT antibody or fragment thereof which specifically binds to an epitope that is identical to an epitope to which the antibody KY04 specifically binds.
[0114] An anti-TIGIT antibody or fragment which competes for binding to human TIGIT with the antibody KY01.
[0115] An anti-TIGIT antibody or fragment which competes for binding to human TIGIT with the antibody KY02.
[0116] An anti-TIGIT antibody or fragment which competes for binding to human TIGIT with the antibody KY03.
[0117] An anti-TIGIT antibody or fragment which competes for binding to human TIGIT with the antibody KY04.
[0118] In a fourth configuration, there is provided an antibody or fragment thereof which competes for binding to human TIGIT with an anti-TIGIT antibody of the invention (such as any one of KY01-KY23), eg, as determined by SPR.

[0119] In a fifth configuration, there is provided an antibody or a fragment thereof which comprises a binding site comprising a VH domain and a VL domain, wherein the binding site specifically binds TIGIT, and wherein
[0120] a) the VH domain is encoded by a nucleotide sequence that is derived from the recombination of a human VH gene segment, DH gene segment and JH gene segment, wherein the VH gene segment is selected from IGHV3-11, IGHV3-15, IGHV3-20, IGHV3-9 and IGHV4-4; and
[0121] b) the VL domain is encoded by a nucleotide sequence that is derived from the recombination of a human VL gene segment and JL gene segment, wherein the VL gene segment is selected from IGKV1-39, IGKV1D-39, IGKV1-5, IGLV3-1, IGKV2-28 and IGLV3-10.

[0122] In a sixth configuration, there is provided an anti-TIGIT immunocytokine (ICK) comprising an immunoglobulin heavy and an optional light chain, wherein immunocytokine comprises an antibody binding site that specifically binds TIGIT and optionally comprises a VH domain of the heavy chain, the VH domain being according to the invention.
[0123] In a seventh configuration, there is provided the antibody, fragment or immunocytokine according to the invention for treating a cancer in a human or animal subject by
[0124] a. inhibiting the binding of TIGIT to CD155 in a tumour microenvironment;
[0125] b. inhibiting P-Tyr and/or NFkβ signalling in TIGIT⁺ T- and/or NK cells;
[0126] c. inhibiting tumour cell-mediated (eg, PD-L1-positive tumour cell-mediated) suppression of T- and/or NK cells in a tumour microenvironment of the cancer in a subject (eg, a human) suffering from the cancer; and/or
[0127] d. reducing TIGIT-mediated inhibition of one or more T-cell factors in a tumour microenvironment of said cancer, wherein each factor is selected from T-bet, GATA3, IFN regulatory factor (IFR)4, RORc, IL-2 and IFN-γ.

[0128] In a eighth configuration, there is provided the antibody, fragment or immunocytokine according to the invention for treating or preventing a TIGIT-mediated disease or condition, e.g. selected from neoplastic or non-neoplastic disease, chronic viral infections, and malignant tumours, such as melanoma, Merkel cell carcinoma, non-small cell lung cancer (squamous and non-squamous), renal cell cancer, bladder cancer, head and neck squamous cell carcinoma, mesothelioma, virally induced cancers (such as cervical cancer and nasopharyngeal cancer), soft tissue sarcomas, haematological malignancies such as Hodgkin's and non-Hodgkin's disease and diffuse large B-cell lymphoma (for example melanoma, Merkel cell carcinoma, non-small cell lung cancer (squamous and non-squamous), renal cell cancer, bladder cancer, head and neck squamous cell carcinoma and mesothelioma or for example virally induced cancers (such as cervical cancer and nasopharyngeal cancer) and soft tissue sarcomas). A corresponding use and method is also provided.

[0129] The invention further provides pharmaceutical compositions, nucleic acids, vectors and host cells.

### DESCRIPTION OF THE FIGURES

[0130] FIG. 1: Analysis of selected antibodies in a dendritic cell-T-cell mixed lymphocyte reaction. Monocytes were cultured with GM-CSF and IL-4 for seven days, before addition of allogeneic purified CD3⁺ T-cells and titrations of antibodies. Supernatants were taken at day 5 for analysis of IFNγ production. Data is shown from one experiment. Note that for 84G09, there is a single point per concentration, as one replicate failed

[0131] FIG. 2: PD-L1 direct neutralisation ELISA with PD-1 receptor. Neutralisation profiles of 1D05 and 84G09 compared to a benchmark anti-PD-L1 antibody and isotype control. Data representative of three independent experiments

[0132] FIG. 3: Human PD-L1 CHO-S FACS neutralisation with PD-1 receptor. Neutralisation profiles of 1D05 and 84G09 compared to a benchmark anti-PD-L1 antibody and isotype control. Data representative of three independent experiments

[0133] FIG. 4: Human PD-L1 CHO FACS neutralisation with CD80 receptor. Neutralisation profiles of the 1D05 and 84G09 compared to the benchmark anti-PD-L1 antibody and isotype control. Data representative of three independent experiments

[0134] FIG. 5: Binding of lead antibodies to PD-L1 but not PD-L2. Lead antibodies bind to plate bound PD-L1 (FIG. 5a) but not PD-L2 (FIG. 5b). An anti-PD-L2 antibody was used as a control. Data are expressed as time resolved fluorescence units at 615 nm. Data representative of two independent experiments

[0135] FIG. 6: Lead antibodies induce IFNγ production in a Dendritic Cell-T-cell mixed lymphocyte reaction. Immature dendritic cells were co-cultured with allogeneic CD4⁺ T-cells in the presence of antibodies for 5 days. IFNγ was measured in supernatants by ELISA. Data are representative of three independent experiments. B1 refers to a benchmark antibody

[0136] FIG. 7: Lead antibodies bind to natively expressed PD-L1 on dendritic cells. Dendritic cells were generated from monocyte precursors with GM-CSF and IL-4 and stained with lead antibodies (a) 1D05 and (b) 84G09, and isotype control directly labelled with AlexaFluor647. Data shown is from one blood donor, representative of four donors

[0137] FIG. 8a: PD-L1 direct neutralisation ELISA with PD-1 receptor. Neutralisation profiles of KM121 hits compared to a benchmark anti-PD-L1 antibody and isotype control. Data representative of three independent experiments

[0138] FIG. 8b: PD-L1 direct neutralisation ELISA with PD-1 receptor. Neutralisation profiles of KM122 lead candidate molecules compared to the benchmark anti-PD-L1 antibody. Data is from a single experiment

[0139] FIG. 8c: PD-L1 direct neutralisation ELISA with PD-1 receptor. Neutralisation profile of KM122 lead candidate molecule 416E01 compared to the benchmark anti-PD-L1 antibody. Data is from a single experiment

[0140] FIG. 9a: PD-L1 direct neutralisation ELISA with CD80 receptor. Neutralisation profiles of KM121 hits compared to a benchmark anti-PD-L1 antibody and isotype control. Data representative of three independent experiments

[0141] FIG. 9b: PD-L1 direct neutralisation ELISA with CD80 receptor. Neutralisation profiles of KM122 lead candidate molecules compared to the benchmark anti-PD-L1 antibody. Data is from a single experiment

[0142] FIG. 9c: PD-L1 direct neutralisation ELISA with CD80 receptor. Neutralisation profiles of KM122 lead candidate molecule 416E01 compared to the benchmark anti-PD-L1 antibody. Data is from a single experiment

[0143] FIG. 10: Bispecific binding as measured by SPR, with PD-L1 as first antigen, and TIGIT as second antigen. A) Bispecific 1, B) Bispecific 2, C) Bispecific 3, D) Bispecific 4. For detailed construction information of each Bispecific construct, see Table 6

[0144] FIG. 11: Bispecific binding as measured by SPR, with TIGIT as first antigen, and PD-L1 as second antigen. A) Bispecific 1, B) Bispecific 2, C) Bispecific 3, D) Bispecific 4. For detailed construction information of each Bispecific construct, see Table 6

[0145] FIG. 12(a): Ability of immunocytokine constructs to induce proliferation in IL-2Raβγ expressing TF-1 cells, compared with equimolar concentrations of free IL-2. Data shown is from a single experiment, representative of three experiments

[0146] FIG. 12(b): Ability of immunocytokine constructs to induce proliferation in IL-2Rβγ expressing TF-1 cells, compared with equimolar concentrations of free IL-2. Data shown is from a single experiment, representative of four experiments

[0147] FIG. 13(a): Capacity of 1D05 antibody to neutralise the interaction between PD-1 and PD-L1 is unaffected by the fusion of IL-2 to the antibody, as measured in a neutralisation ELISA. Data shown is from a single experiment, representative of three experiments

[0148] FIG. 13(b): Capacity of 1D05 antibody to neutralise the interaction between CD80 and PD-L1 is unaffected by the fusion of IL-2 to the antibody, as measured in a neutralisation ELISA. Data shown is from a single experiment, representative of three experiments

[0149] FIG. 14: Mean group and individual animal growth curves for the NOD/SCID: Xenograft in vivo efficacy study

[0150] FIG. 14(a): shows the group mean (n=8/9) tumour growth curve, for this graph when an animal is removed from the study due to tumour size, the last reading is used for the rest of the study. The shaded area shows the area where the last reading is being used

[0151] FIGS. 14(b) to (e): show the individual animal tumour growth curves for each group. (b) A375 tumours alone; (c) A375 tumours co-injected with CD4⁺/8⁺ T-cells at a 6:1 ratio. For panels (d) and (e) A375 tumour cell were co-injected with CD4⁺/8⁺ T-cells at a 6:1 ratio; (d) Isotype Control antibody at 10 mg/kg and (e) anti-PD-L1 antibody 1D05 at 10 mg/kg. Dosing was at 1-hour post tumour/T-cell implantation and on days 3, 6, 8 and 10, shown on the graph by the dotted lines

[0152] FIG. 15: Kaplan-Meier plot for the NOD/SCID:Xenograft in vivo efficacy study showing the number of animals still on study. This plot shows the slight increase in the time on study when CD4⁺/CD8⁺ T-cells are co-injected with the tumour cells (T-cells/A375) (n=9) when compared to the tumour cells alone A375 group (n=9). Treatment with the isotype control (T-cells/A375—Isotype (n=8)) had no effect on survival when compared to the T-cells co-injected with the tumour cells without antibody. Treatment with 10 mg/kg of the anti-PD-L1 antibody 1D05 (T-cells/A375—anti-PD-L1) (n=8)) significantly increased the time on study when compared to the isotype control group. Dosing was 1-hour post injection of the T-cells/tumour cells and on days 3, 6, 8 and 10, show on the graph by the dotted lines

[0153] FIG. 16: Expansion of lymphocytes in response to dosing with immunocytokines. Fasting blood samples were taken into EDTA treated tubes pre-treatment (0), and 2, 5 and 7 days post-treatment. Cell counts were measured by the Bayer Advia 120. Results are expressed as fold change in lymphocyte count

[0154] FIG. 17: Analysis of standard haematological parameters in response to dosing with immunocytokines. Fasting blood samples were taken into EDTA treated tubes pre-treatment and 7 days post-treatment. Analysis of haemoglobin, haematocrit, red blood cell counts and platelet counts were performed using the Bayer Advia 120. Results are expressed as the percentage change in parameter 7 days post-dosing

[0155] FIG. 18: Cytokine levels in plasma of cynomolgus monkeys dosed with immunocytokine molecules. Plasma samples were obtained pre-treatment (PT) and 3 days after dosing (D3) and analysed by MSD for levels of a) TNF-α; b) IL-8; c) IL-6; d) IFNγ; e) G-CSF and f) IL-2. Where no bar is included, cytokine levels were below the limit of quantification of the assay. IL4, IL-5 and IL-1β were not detectable in any sample at either timepoint and so are not included in the graphs

[0156] FIG. 19: Levels of soluble CD25 in plasma of cynomolgus monkeys dosed with immunocytokine molecules. Plasma samples were obtained pre-treatment (PT) and 3 days after dosing (D3) and analysed using a commercial ELISA kit. * indicates levels above limit of quantification (20,000 pg/mL)

[0157] FIG. 20: Flow cytometric analysis of PBMC subsets. Whole blood was stained for markers of a) T-cells and b) B-cells, NK cells, neutrophils and monocytes, prior to red blood cell lysis and fixation. Data is expressed as the fold change in cell number 5 days after dosing. Data for 1D05 LC D9-7 ICK is missing due to unusable sample

[0158] FIG. 21: Pharmacokinetic (PK) analysis of immunocytokines. Serum was prepared from blood samples taken at various time points over 96 hours. In panels a) and b), serum was incubated on plates coated with PD-L1 and immunocytokines detected with a biotinylated anti-human Fc detection antibody, and streptavidin-labelled Europium. In panels c) and d), serum was incubated on plates coated with PD-L1 and immunocytokines detected with a biotinylated anti-human IL-2 antibody, and streptavidin-labelled Europium. Results are expressed as ng/mL

[0159] FIG. 22a: Induction of IFNγ production in a monocyte-T-cell co-culture assay by anti-PD-L1 antibodies in human IgG1 format. Each data point represents the mean fold induction from at least three independent experiments, ±standard error of the mean

[0160] FIG. 22b: Induction of IFNγ production in a monocyte-T-cell co-culture assay by an anti-PD-L1 antibody in human IgG4(PE) format. Each data point represents the mean fold induction from two independent experiments, ±standard deviation

[0161] FIG. 23(a): Induction of IL-2 in a murine T-cell hybridoma assay. Human PD-L1 transfected LK35.2 cells were loaded with ovalbumin peptide and co-cultured overnight with DO-11-10 T-cell hybridoma cells in the presence of anti-PD-L1 antibodies or controls, prior to collection of supernatants and analysis of IL-2 release. Each data point indicates background-corrected mean IL-2 release from three independent experiments ±standard deviation

[0162] FIG. 23(b): Induction of IL-2 in a murine T-cell hybridoma assay. Human PD-L1 transfected LK35.2 cells were loaded with ovalbumin peptide and co-cultured overnight with DO-11-10 T-cell hybridoma cells in the presence of ICOS/PD-L1 bi-specific molecules, or individual antibodies, prior to collection of supernatants and analysis of IL-2 release. Each data point indicates background-corrected mean IL-2 release from three independent experiments ±standard deviation

[0163] FIG. 24(a): Induction of IFN-γ in a DC-T-cell MLR assay. Monocyte derived dendritic cells (DC) were activated with E. coli LPS and co-cultured with allogeneic CD3⁺ T-cells at a 1:1 ratio. IFNγ was measured by DELFIA assay after 5 days of co-culture. Data is from a single experiment

[0164] FIG. 24(b): Induction of IL-2 in a DC-T-cell MLR assay. Monocyte derived dendritic cells (DC) were activated with E. coli LPS and co-cultured with allogeneic CD3⁺ T-cells at a 1:1 ratio. IL-2 was measured by DELFIA assay after 3 days of co-culture. Data is from a single experiment

[0165] FIG. 25: Titration of FIT-Ig molecules, parental monospecific antibodies, and control antibodies in PD-L1/TIGIT AlphaScreen® Binding Assay using method one. Antibodies were incubated with PD-L1 and TIGIT proteins for an hour before the addition of AlphaScreen® acceptor beads for an hour followed by the addition of AlphaScreen® donor beads for another hour prior to the detection of fluorescence. A) Titration of FIT-Ig molecules; B) Titration of monospecific antibodies. Data shown are representative of one unique experiment

[0166] FIG. 26: Titration of FIT-Ig molecules, parental monospecific antibodies, and control antibodies in PD-L1/TIGIT AlphaScreen® Binding Assay using method two. AlphaScreen® donor and acceptor beads were coated for an hour with PD-L1 and TIGIT proteins respectively before the addition of antibodies for an hour followed by the detection of fluorescence. A) Titration of FIT-Ig molecules; B) Titration of monospecific antibodies. Data shown are representative of one unique experiment

[0167] FIG. 27: Titration of FIT-Ig molecules, and control antibody in a PD-L1/TIGIT cell recruitment assay by flow cytometry. CHO human PD-L1 and HEK human TIGIT were stained with CellTrace™ Far Red and CellTrace™ Violet respectively and co-cultured in presence of antibodies for an hour prior to the detection of fluorescence and identification of double positive population. Data shown are representative of one unique experiment

[0168] FIG. 28: Expansion of lymphocytes in response to dosing with immunocytokines. Fasting blood samples were taken into EDTA treated tubes pre-treatment (0), and 2, 5 and 7, 10, 14 and 23 days post-treatment. Cell counts were measured by the Bayer Advia 120. Results are expressed as fold change in lymphocyte count

[0169] FIG. 29: Levels of soluble CD25 in plasma of cynomolgus monkeys dosed with immunocytokine molecules. Plasma samples were obtained pre-treatment (0) and 3, 7 and 10 days after dosing and analysed using a commercial ELISA kit

[0170] FIG. 30: Analysis of standard haematological parameters in response to dosing with immunocytokines. Fasting blood samples were taken into EDTA treated tubes pre-treatment (0) and 2, 5, 7, 10, 14 and 23 days post-treatment. Analysis of A) haemoglobin, B) haematocrit, C) red blood cell counts and D) platelet counts were performed using the Bayer Advia 120. Results are expressed as the fold change in parameter at each timepoint

[0171] FIG. 31: Cytokine levels in plasma of cynomolgus monkeys dosed with immunocytokine molecules. Plasma samples were obtained pre-treatment (0) and 1, 3, 7, 10, 14 and 23 days after dosing and analysed by MSD for levels of a) TNF-α; b) IL-8; c) IL-6; d) IFNγ; e) G-CSF, f) IL-2, g) IL-4 and h) IL-5. Where no bar is included, cytokine levels were below the limit of quantification of the assay. IL-1β was not detectable in any samples and so is not included in the graphs

[0172] FIG. 32: Pharmacokinetic (PK) analysis of immunocytokines. Serum was prepared from blood samples taken at various time points over 96 hours. Serum was incubated on plates coated with PD-L1 and immunocytokines detected with a biotinylated anti-human Fc detection antibody, and streptavidin-labelled Europium. Results are expressed as % peak concentration

[0173] FIG. 33: Expansion of specific T-cell subsets by ICK molecules. Whole blood was incubated with antibodies for staining, before red blood cell lysis, fixation and analysis by flow cytometry. Results are expressed as fold change in absolute (a) CD4⁺ T-cell and (b) CD8⁺ T-cell numbers at each timepoint.

[0174] FIG. 34: Effector function of lead antibodies in a reporter cell assay. PD-L1 expressing target cells (ES2) were co-cultured overnight with Jurkat cells, engineered to express NFAT-induced luciferase and FcγRIIIa, in the presence of PD-L1 antibodies. Each data point indicates mean fold induction of relative light units±standard deviation. Data is from one representative experiment, of three independent experiments

[0175] FIG. 35: Binding of lead antibodies to cell-expressed cynomolgus PD-L1. Antibodies were titrated on CHO cells expressing cynomolgus PD-L1, and bound antibody detected with an anti-human IgG AlexaFluor 647. Data is from a single experiment

[0176] FIG. 36(a): Human PD-L1 CHO-S FACS neutralisation with PD-1 receptor. Neutralisation profiles of lead antibodies compared to a benchmark anti-PD-L1 antibody and isotype control. Data representative of two independent experiments

[0177] FIG. 36(b): Human PD-L1 CHO-S FACS neutralisation with CD80 receptor. Neutralisation profiles of lead antibodies compared to a benchmark anti-PD-L1 antibody and isotype control. Data representative of two independent experiments

[0178] FIG. 37: Induction of IFNγ production in a monocyte-T-cell co-culture assay by anti-PD-L1 antibodies in human IgG1 format. Each data point represents the mean fold induction of IFNγ from at least three independent experiments, ±standard error of the mean

[0179] FIG. 38: Four lead molecules (KY01, KY02, KY03 and KY04) were tested in the TIGIT/CD155 receptor ligand HTRF® assay. Plot represents the mean and standard error of the percentage of CD155 specific binding versus antibody concentration (Log(M)) obtained in two independent experiments

[0180] FIG. 39: Binding to human TIGIT and blocking of CD155/TIGIT interaction was investigated by flow cytometry using human TIGIT HEK 293 cells treated with recombinant CD155. Example data is shown for lead molecule KY02. Percentage of CD155 specific binding and PE geometric mean (geomean) referring to antibody binding were plotted on the left Y and right Y axis respectively versus antibody concentration (Log(M).

### DETAILED DESCRIPTION

### 1. Definitions

[0181] Disclosures in this Definitions expressed in terms of PD-L1 and anti-PD-L1 antibodies and fragments apply mutatis mutandis to the invention herein as it relates to TIGIT, ICOS and anti-TIGIT or anti-ICOS antibodies and fragments.

[0182] Unless otherwise defined herein, scientific and technical terms shall have the meanings that are commonly understood by those of ordinary skill in the art. Further, unless otherwise required by context, singular terms shall include pluralities and plural terms shall include the singular.

[0183] The singular terms “a,” “an,” and “the” include plural referents unless context clearly indicates otherwise. Similarly, the word “or” is intended to include “and” unless the context clearly indicates otherwise. Although methods and materials similar or equivalent to those described herein can be used in the practice or testing of this disclosure, suitable methods and materials are described below. The abbreviation, “e.g.” is derived from the Latin exempli gratia, and is used herein to indicate a non-limiting example. Thus, the abbreviation “e.g.” is synonymous with the term “for example.”

[0184] In the specification and claims, the term “about” is used to modify, for example, the quantity of an ingredient in a composition, concentration, volume, process temperature, process time, yield, flow rate, pressure, and like values, and ranges thereof, employed in describing the embodiments of the disclosure. The term “about” refers to variation in the numerical quantity that can occur, for example, through typical measuring and handling procedures used for making compounds, compositions, concentrates or use formulations; through inadvertent error in these procedures; through differences in the manufacture, source, or purity of starting materials or ingredients used to carry out the methods, and like proximate considerations. The term “about” also encompasses amounts that differ due to aging of a formulation with a particular initial concentration or mixture, and amounts that differ due to mixing or processing a formulation with a particular initial concentration or mixture. Where modified by the term “about” the claims appended hereto include equivalents to these quantities.

[0185] As used herein, “administer” or “administration” refers to the act of injecting or otherwise physically delivering a substance as it exists outside the body (e.g., an anti-hPD-L1 antibody provided herein) into a patient, such as by mucosal, intradermal, intravenous, intramuscular delivery and/or any other method of physical delivery described herein or known in the art. When a disease, or a symptom thereof, is being treated, administration of the substance typically occurs after the onset of the disease or symptoms thereof. When a disease, or symptoms thereof, are being prevented, administration of the substance typically occurs before the onset of the disease or symptoms thereof.

[0186] The term “antibody”, “immunoglobulin” or “Ig” may be used interchangeably herein and means an immunoglobulin molecule that recognizes and specifically binds to a target, such as a protein, polypeptide, peptide, carbohydrate, polynucleotide, lipid, or combinations of the foregoing through at least one antigen recognition site within the variable region of the immunoglobulin molecule. As used herein, the term “antibody” encompasses intact polyclonal antibodies, intact monoclonal antibodies, antibody fragments (such as Fab, Fab′, F(ab′)₂, and Fv fragments), single chain Fv (scFv) mutants, multispecific antibodies such as bispecific antibodies (including dual binding antibodies), chimeric antibodies, humanized antibodies, human antibodies, fusion proteins comprising an antigen determination portion of an antibody, and any other modified immunoglobulin molecule comprising an antigen recognition site so long as the antibodies exhibit the desired biological activity. The term “antibody” can also refer to a Y-shaped glycoprotein with a molecular weight of approximately 150 kDa that is made up of four polypeptide chains: two light (L) chains and two heavy (H) chains. There are five types of mammalian Ig heavy chain isotypes denoted by the Greek letters alpha (α), delta (δ), epsilon (ε), gamma (γ), and mu (μ). The type of heavy chain defines the class of antibody, i.e., IgA, IgD, IgE, IgG, and IgM, respectively. The γ and α classes are further divided into subclasses on the basis of differences in the constant domain sequence and function, e.g., IgG1, hIgG2, mIgG2A, mIgG2B, IgG3, IgG4, IgA1 and IgA2. In mammals, there are two types of immunoglobulin light chains, A and K. The “variable region” or “variable domain” of an antibody refers to the amino-terminal domains of the heavy or light chain of the antibody. The variable domains of the heavy chain and light chain may be referred to as “V_{H}” and “V_{L}”, respectively. These domains are generally the most variable parts of the antibody (relative to other antibodies of the same class) and contain the antigen binding sites. An example of antibodies are heavy chain-only (ie, H2) antibodies that comprise a dimer of a heavy chain (5′-VH-(optional Hinge)-CH2-CH3-3′) and are devoid of a light chain.

[0187] The antibodies described herein may be oligoclonal, polyclonal, monoclonal (including full-length monoclonal antibodies), camelised, chimeric, CDR-grafted, multi-specific, bi-specific (including dual-binding antibodies), catalytic, chimeric, humanized, fully human, anti-idiotypic, including antibodies that can be labelled in soluble or bound form as well as fragments, variants or derivatives thereof, either alone or in combination with other amino acid sequences provided by known techniques. An antibody may be from any species. Antibodies described herein can be naked or conjugated to other molecules such as toxins, radioisotopes, etc.

[0188] The term “antigen binding domain,” “antigen binding region,” “antigen binding fragment,” and similar terms refer to that portion of an antibody which comprises the amino acid residues that interact with an antigen and confer on the binding agent its specificity and affinity for the antigen (e.g. the complementarity determining regions (CDRs)). The antigen binding region can be derived from any animal species, such as rodents (e.g. rabbit, rat or hamster) and humans. Preferably, the antigen binding region will be of human origin.

[0189] Antigen binding fragments described herein can include single-chain Fvs (scFv), single-chain antibodies, single domain antibodies, domain antibodies, Fv fragments, Fab fragments, F(ab′) fragments, F(ab′)₂ fragments, antibody fragments that exhibit the desired biological activity, disulfide-stabilised variable region (dsFv), dimeric variable region (diabody), anti-idiotypic (anti-Id) antibodies (including, e.g. anti-Id antibodies to antibodies), intrabodies, linear antibodies, single-chain antibody molecules and multispecific antibodies formed from antibody fragments and epitope-binding fragments of any of the above. In particular, antibodies and antibody fragments described herein can include immunoglobulin molecules and immunologically active fragments of immunoglobulin molecules, i.e., molecules that contain an antigen-binding site. Digestion of antibodies with the enzyme, papain, results in two identical antigen-binding fragments, known also as “Fab” fragments, and a “Fc” fragment, having no antigen-binding activity but having the ability to crystallize. “Fab” when used herein refers to a fragment of an antibody that includes one constant and one variable domain of each of the heavy and light chains. The term “Fc region” herein is used to define a C-terminal region of an immunoglobulin heavy chain, including native-sequence Fc regions and variant Fc regions. The “Fc fragment” refers to the carboxy-terminal portions of both H chains held together by disulfides. The effector functions of antibodies are determined by sequences in the Fc region, the region which is also recognized by Fc receptors (FcR) found on certain types of cells. Digestion of antibodies with the enzyme, pepsin, results in a F(ab′)₂ fragment in which the two arms of the antibody molecule remain linked and comprise two-antigen binding sites. The F(ab′)₂ fragment has the ability to crosslink antigen.

[0190] “Fv” when used herein refers to the minimum fragment of an antibody that retains both antigen-recognition and antigen-binding sites. This region consists of a dimer of one heavy and one light chain variable domain in tight, non-covalent or covalent association. It is in this configuration that the three CDRs of each variable domain interact to define an antigen-binding site on the surface of the V_{H}-V_{L} dimer. Collectively, the six CDRs confer antigen-binding specificity to the antibody. However, even a single variable domain (or half of an Fv comprising only three CDRs specific for an antigen) has the ability to recognize and bind antigen, although at a lower affinity than the entire binding site.

[0191] The term “monoclonal antibody” as used herein refers to an antibody obtained from a population of substantially homogeneous antibodies, i.e. the individual antibodies comprising the population are identical except for possible naturally occurring mutations and/or post-translation modifications (e.g. isomerizations, amidations) that may be present in minor amounts. Monoclonal antibodies are highly specific, and are directed against a single antigentic determinant or epitope. In contrast, polyclonal antibody preparations typically include different antibodies directed against different antigenic determinants (or epitopes). The term “monoclonal antibody” as used herein encompasses both intact and full-length monoclonal antibodies as well as antibody fragments (such as Fab, Fab′, F(ab′)₂, Fv), single chain (scFv) mutants, fusion proteins comprising an antibody portion, and any other modified immunoglobulin molecule comprising an antigen recognition site. Furthermore, “monoclonal antibody” refers to such antibodies made in any number of ways including, but not limited to, hybridoma, phage selection, recombinant expression, and transgenic animals.

[0192] The monoclonal antibodies herein can include “chimeric” antibodies (immunoglobulins) in which a portion of the heavy and/or light chain is identical with or homologous to corresponding sequences in antibodies derived from a particular species or belonging to a particular antibody class or subclass, while the remainder of the chain(s) is(are) identical with or homologous to corresponding sequences in antibodies derived from another species or belonging to another antibody class or subclass, as well as fragments of such antibodies that exhibit the desired biological activity.

[0193] The term “humanized antibody” refers to a subset of chimeric antibodies in which a “hypervariable region” from a non-human immunoglobulin (the donor antibody) replaces residues from a hypervariable region in a human immunoglobulin (recipient antibody). In general, a humanized antibody will include substantially all of at least one, and typically two, variable domains, in which all or substantially all of the hypervariable loops correspond to those of a non-human immunoglobulin sequence, and all or substantially all of the framework regions are those of a human immunoglobulin sequence, although the framework regions may include one or more substitutions that improve antibody performance, such as binding affinity, isomerization, immunogenicity, etc.

[0194] The term “bispecific antibody” means an antibody which comprises specificity for two target molecules, and includes, but is not limited to, formats such as DVD-Ig (see DiGiammarino et al., “Design and generation of DVD-Ig™ molecules for dual-specific targeting”, Meth. Mo. Biol., 2012, 889, 145-156), mAb² (see WO2008/003103, the description of the mAb² format is incorporated herein by reference), FIT-Ig (see WO2015/103072, the description of the FIT-Ig scaffold is incorporated herein by reference), mAb-dAb, dock and lock, Fab-arm exchange, SEEDbody, Triomab, LUZ-Y, Fcab, KA-body, orthogonal Fab, scDiabody-Fc, diabody-Fc, tandem scFv-Fc, Fab-scFv-Fc, Fab-scFv, intrabody, BiTE, diabody, DART, TandAb, scDiabody, scDiabody-CH3, Diabody-CH3, Triple body, Miniantibody, minibody, TriBi minibody, scFv-CH3 KIH, scFv-CH-CL-scFv, F(ab′)₂-scFv, scFv-KIH, Fab-scFv-Fc, tetravalent HCab, ImmTAC, knobs-in-holes, knobs-in-holes with common light chain, knobs-in-holes with common light chain and charge pairs, charge pairs, charge pairs with common light chain, DT-IgG, DutaMab, IgG(H)-scFv, scFv-(H)IgG, IgG(L)-scFv, scFv-(L)IgG, IgG(L,H)-Fv, IgG(H)-V, V(H)-IgG, IgG(L)-V, V(L)-IgG, KIH IgG-scFab, 2scFv-IgG, IgG-2scFv, scFv4-Ig and zybody. For a review of bispecific formats, see Spiess, C., et al., Mol. Immunol. (2015). In another embodiment, the bispecific molecule comprises an antibody which is fused to another non-Ig format, for example a T-cell receptor binding domain; an immunoglobulin superfamily domain; an agnathan variable lymphocyte receptor; a fibronectin domain (e.g. an Adnectin™); an antibody constant domain (e.g. a CH₃ domain, e.g., a CH₂ and/or CH₃ of an Fcab™) wherein the constant domain is not a functional CH₁ domain; an scFv; an (scFv)₂; an sc-diabody; an scFab; a centyrin and an epitope binding domain derived from a scaffold selected from CTLA-4 (Evibody™); a lipocalin domain; Protein A such as Z-domain of Protein A (e.g. an Affibody™ or SpA); an A-domain (e.g. an Avimer™ or Maxibody™); a heat shock protein (such as and epitope binding domain derived from GroEI and GroES); a transferrin domain (e.g. a trans-body); ankyrin repeat protein (e.g. a DARPin™); peptide aptamer; C-type lectin domain (e.g. Tetranectin™); human γ-crystallin or human ubiquitin (an affilin); a PDZ domain; scorpion toxin; and a kunitz type domain of a human protease inhibitor.

[0195] In one embodiment, the bispecific antibody is a mAb². A mAb² comprises a V_{H} and V_{L} domain from an intact antibody, fused to a modified constant region, which has been engineered to form an antigen-binding site, known as an “Fcab”. The technology behind the Fcab/mAb² format is described in more detail in WO2008/003103, and the description of the mAb² format is incorporated herein by reference.

[0196] In one embodiment, a “bispecific antibody” does not include a FIT-Ig format. In one embodiment, a “bispecific antibody” does not include a mAb² format. In one embodiment, a “bispecific antibody” does not include either a FIT-Ig format or a mAb² format.

[0197] In another embodiment, the bispecific antibody is a “dual binding antibody”. As used herein, the term “dual binding antibody” is a bispecific antibody wherein both antigen-binding domains are formed by a V_{H}/V_{L} pair, and includes FIT-Ig (see WO2015/103072, incorporated herein by reference), mAb-dAb, dock and lock, Fab-arm exchange, SEEDbody, Triomab, LUZ-Y, Fcab, KA-body, orthogonal Fab, scDiabody-Fc, diabody-Fc, tandem scFv-Fc, Fab-scFv-Fc, Fab-scFv, intrabody, BiTE, diabody, DART, TandAb, scDiabody, scDiabody-CH3, Diabody-CH3, Triple body, Miniantibody, minibody, scFv-CH₃ KIH, scFv-CH-CL-scFv, F(ab′)₂-scFv, scFv-KIH, Fab-scFv-Fc, tetravalent HCab, ImmTAC, knobs-in-holes, knobs-in-holes with common light chain, knobs-in-holes with common light chain and charge pairs, charge pairs, charge pairs with common light chain, DT-IgG, DutaMab, IgG(H)-scFv, scFv-(H)IgG, IgG(L)-scFv, scFv-(L)IgG, IgG(L,H)-Fv, IgG(H)-V, V(H)-IgG, IgG(L)-V, V(L)-IgG, KIN IgG-scFab, 2scFv-IgG, IgG-2scFv and scFv4-Ig.

[0198] The term “hypervariable region”, “CDR region” or “CDR” refers to the regions of an antibody variable domain which are hypervariable in sequence and/or form structurally defined loops. Generally, antigen binding sites of an antibody include six hypervariable regions: three in the V_{H} (CDRH1, CDRH2, CDRH3), and three in the V_{L} (CDRL1, CDRL2, CDRL3). These regions of the heavy and light chains of an antibody confer antigen-binding specificity to the antibody. CDRs may be defined according to the Kabat system (see Kabat, E. A. et al., 1991, “Sequences of Proteins of Immunological Interest”, 5th edit., NIH Publication no. 91-3242, U.S. Department of Health and Human Services). Other systems may be used to define CDRs, which as the system devised by Chothia et al (see Chothia, C. & Lesk, A. M., 1987, “Canonical structures for the hypervariable regions of immunoglobulins”, J. Mol. Biol., 196, 901-917) and the IMGT system (see Lefranc, M. P., 1997, “Unique database numbering system for immunogenetic analysis”, Immunol. Today, 18, 50). An antibody typically contains 3 heavy chain CDRs and 3 light chain CDRs. The term CDR or CDRs is used here to indicate one or several of these regions. A person skilled in the art is able to readily compare the different systems of nomenclature and determine whether a particular sequence may be defined as a CDR.

[0199] A “human antibody” is an antibody that possesses an amino-acid sequence corresponding to that of an antibody produced by a human and/or has been made using any of the techniques for making human antibodies and specifically excludes a humanized antibody comprising non-human antigen-binding residues. The term “specifically binds to” refers to measurable and reproducible interactions such as binding between a target and an antibody, which is determinative of the presence of the target in the presence of a heterogeneous population of molecules including biological molecules. For example, an antibody that specifically binds to a target (which can be an epitope) is an antibody that binds this target with greater affinity, avidity, more readily, and/or with greater duration than it binds to other targets. In one embodiment, the extent of binding of an antibody to an unrelated target is less than about 10% of the binding of the antibody to the target as measured, e.g. by a radioimmunoassay (RIA).

[0200] An antibody or a fragment thereof that specifically binds to a hPD-L1 antigen may be cross-reactive with related antigens. Preferably, an antibody or a fragment thereof that specifically binds to a hPD-L1 antigen does not cross-react with other antigens (but may optionally cross-react with PD-L1 of a different species, e.g. rhesus, or murine). An antibody or a fragment thereof that specifically binds to a hPD-L1 antigen can be identified, for example, by immunoassays, BIAcore™, or other techniques known to those of skill in the art. An antibody or a fragment thereof binds specifically to a PD-L1 antigen when it binds to a hPD-L1 antigen with higher affinity than to any cross-reactive antigen as determined using experimental techniques, such as radioimmunoassays (RIA) and enzyme-linked immunosorbent assays (ELISAs). Typically, a specific or selective reaction will be at least twice background signal or noise and more typically more than 10 times (such as more than 15 times, more than 20 times, more than 50 times or more than 100 times) background. See, e.g. Paul, ed., 1989, Fundamental Immunology Second Edition, Raven Press, New York at pages 332-336 for a discussion regarding antibody specificity.

[0201] The term “aliphatic amino acid” means that the amino acid R groups are nonpolar and hydrophobic. Hydrophobicity increases with increasing number of C atoms in the hydrocarbon chain. Glycine, Alanine, Valine, Leucine and Isoleucine are aliphatic amino acids.

[0202] The term “aromatic amino acid” means that the amino acid R groups contain an aromatic ring system. Phenylalanine, Tyrosine and Tryptophan are aromatic amino acids.

[0203] The term “hydroxyl-containing amino acid” means that the amino acid R groups contain a hydroxyl group, and are hydrophilic. Serine, Cysteine, Threonine and Methionine are hydroxyl-containing amino acids.

[0204] The term “basic amino acid” means that the amino acid R groups are nitrogen containing and are basic at neutral pH. Histidine, Lysine and Arginine are basic amino acids.

[0205] The term “cyclic amino acid” means that the amino acid R groups have an aliphatic cyclic structure. Proline is the only cyclic aliphatic amino acid.

[0206] The term “acidic amino acid” means that the amino acid R groups are polar and are negatively charged at physiological pH. Aspartate and Glutamate are acidic amino acids.

[0207] The term “amide amino acid” means that the amino acid R groups contain an amide group. Asparagine and Glutamine are amide amino acids.

[0208] As used herein, “authorization number” or “marketing authorization number” refers to a number issued by a regulatory agency upon that agency determining that a particular medical product and/or composition may be marketed and/or offered for sale in the area under the agency's jurisdiction. As used herein “regulatory agency” refers to one of the agencies responsible for evaluating, e.g. the safety and efficacy of a medical product and/or composition and controlling the sales/marketing of such products and/or compositions in a given area. The Food and Drug Administration (FDA) in the US and the European Medicines Agency (EPA) in Europe are but two examples of such regulatory agencies. Other non-limiting examples can include SDA, MPA, MHPRA, IMA, ANMAT, Hong Kong Department of Health-Drug Office, CDSCO, Medsafe, and KFDA.

[0209] As used herein, the term “biomarker” refers to a gene that is differentially expressed in individuals having a disease of interest, for example, a gene that is differentially expressed in individuals having cancer. In one embodiment, PD-L1 is a biomarker whose expression in tumours may be indicative as to whether or not a patient would respond to a particular type of treatment, in particular, whether a patient would response to treatment targeting PD-L1, for example, immunotherapy using anti-PD-L1 antibodies. In one embodiment, PD-L1 is a biomarker whose expression in tumours may be indicative as to whether or not a patient would respond to a particular type of treatment, in particular, whether a patient would response to treatment targeting PD-1, for example, immunotherapy using anti-PD-1 antibodies. In another embodiment, PD-L1 may be free or membrane bound. In another embodiment, PD-L1 may be fixed or unfixed.

[0210] As used herein, a “buffer” refers to a chemical agent that is able to absorb a certain quantity of acid or base without undergoing a strong variation in pH.

[0211] As used herein, the term “carrier” refers to a diluent, adjuvant (e.g., Freund's adjuvant (complete and incomplete)), excipient, or vehicle with which the therapeutic is administered. Such pharmaceutical carriers can be sterile liquids, such as water and oils, including those of petroleum, animal, vegetable or synthetic origin, such as peanut oil, soybean oil, mineral oil, sesame oil and the like. Water is a preferred carrier when the pharmaceutical composition is administered intravenously. Saline solutions and aqueous dextrose and glycerol solutions can also be employed as liquid carriers, particularly for injectable solutions.

[0212] The term “chemotherapeutic agent” or “chemotherapy” refers to a therapeutic agent whose primary purpose is to destroy cancer cells, typically by interfering with the tumour cell's ability to grow or multiply. There are many different types of chemotherapeutic agents, with more than 50 approved chemotherapy drugs available. Chemotherapeutic drugs can be classified based on how they work. Alkylating drugs kill cancer cells by directly attacking DNA, the genetic material of the genes. Cyclophosphamide is an alkylating drug. Antimetabolites interfere with the production of DNA and keep cells from growing and multiplying. An example of an antimetabolite is 5-fluorouracil (5-FU). Anti-tumour antibiotics are made from natural substances such as fungi in the soil. They interfere with important cell functions, including production of DNA and cell proteins. Doxorubicin and bleomycin belong to this group of chemotherapy drugs. Plant alkaloids prevent cells from dividing normally. Vinblastine and vincristine are plant alkaloids obtained from the periwinkle plant. Steroid hormones slow the growth of some cancers that depend on hormones. For example, tamoxifen is used to treat breast cancers that depend on the hormone estrogen for growth. DNA damage response (DDR) inhibitors, such as PARP inhibitors, block DNA repair mechanisms following single or double stranded breaks.

[0213] Examples of chemotherapeutic agents include Adriamycin, Doxorubicin, 5-Fluorouracil, Cytosine arabinoside (Ara-C), Cyclophosphamide, Thiotepa, Taxotere (docetaxel), Busulfan, Cytoxin, Taxol, Methotrexate, Cisplatin, Melphalan, Vinblastine, Bleomycin, Etoposide, Ifosfamide, Mitomycin C, Mitoxantrone, Vincreistine, Vinorelbine, Carboplatin, Teniposide, Daunomycin, Carminomycin, Aminopterin, Dactinomycin, Mitomycins, Esperamicins (see, U.S. Pat. No. 4,675,187), Melphalan, and other related nitrogen mustards. Suitable toxins and chemotherapeutic agents are described in Remington's Pharmaceutical Sciences, 19th Ed. (Mack Publishing Co. 1995), and in Goodman and Gilman's The Pharmacological Basis of Therapeutics, 7th Ed. (MacMillan Publishing Co. 1985). Another example of chemotherapeutic agents is the class of antibody-conjugated toxins, including, but not limited to pyrrolobenzodiazepiness, maytansanoids, calicheamicin, etc. Other suitable toxins and/or chemotherapeutic agents are known to those of skill in the art.

[0214] As used herein, the term “composition” is intended to encompass a product containing the specified ingredients (e.g. an antibody of the invention) in, optionally, the specified amounts, as well as any product which results, directly or indirectly, from combination of the specified ingredients in, optionally, the specified amounts.

[0215] As used herein the term “comprising” or “comprises” is used with reference to antibodies, fragments, uses, compositions, methods, and respective component(s) thereof, that are essential to the method or composition, yet open to the inclusion of unspecified elements, whether essential or not.

[0216] The term “consisting of” refers to antibodies, fragments, uses, compositions, methods, and respective components thereof as described herein, which are exclusive of any element not recited in that description of the embodiment.

[0217] As used herein the term “consisting essentially of” refers to those elements required for a given embodiment. The term permits the presence of elements that do not materially affect the basic and novel or functional characteristic(s) of that embodiment.

[0218] In the context of a polypeptide, the term “derivative” as used herein refers to a polypeptide that comprises an amino acid sequence of a hPD-L1 polypeptide, a fragment of a hPD-L1 polypeptide, or an antibody that specifically binds to a hPD-L1 polypeptide which has been altered by the introduction of amino acid residue substitutions, deletions or additions. The term “derivative” as used herein also refers to a hPD-L1 polypeptide, a fragment of a hPD-L1 polypeptide, or an antibody that specifically binds to a hPD-L1 polypeptide which has been chemically modified, e.g. by the covalent attachment of any type of molecule to the polypeptide. For example, but not by way of limitation, a hPD-L1 polypeptide, a fragment of a hPD-L1 polypeptide, or a hPD-L1 antibody may be chemically modified, e.g. by glycosylation, acetylation, pegylation, phosphorylation, amidation, derivatization by known protecting/blocking groups, proteolytic cleavage, linkage to a cellular ligand or other protein, etc. The derivatives are modified in a manner that is different from naturally occurring or starting peptide or polypeptides, either in the type or location of the molecules attached. Derivatives further include deletion of one or more chemical groups which are naturally present on the peptide or polypeptide. A derivative of a hPD-L1 polypeptide, a fragment of a hPD-L1 polypeptide, or a hPD-L1 antibody may be chemically modified by chemical modifications using techniques known to those of skill in the art, including, but not limited to specific chemical cleavage, acetylation, formulation, metabolic synthesis of tunicamycin, etc. Further, a derivative of a hPD-L1 polypeptide, a fragment of a hPD-L1 polypeptide, or a hPD-L1 antibody may contain one or more non-classical amino acids. A polypeptide derivative possesses a similar or identical function as a hPD-L1 polypeptide, a fragment of a hPD-L1 polypeptide, or a hPD-L1 antibody described herein.

[0219] The term “effector function” as used herein is meant to refer to one or more of antibody dependant cell mediated cytotoxic activity (ADCC), complement-dependant cytotoxic activity (CDC) mediated responses, Fc-mediated phagocytosis or antibody dependant cellular phagocytosis (ADCP) and antibody recycling via the FcRn receptor.

[0220] An “effective amount” refers to an amount effective, at dosages and for periods of time necessary, to achieve the desired effect, including a therapeutic or prophylactic result. A “therapeutically effective amount” refers to the minimum concentration required to effect a measurable improvement or prevention of a particular disorder. A therapeutically effective amount herein may vary according to factors such as the disease state, age, sex, and weight of the patient, and the ability of the antibody to elicit a desired response in the individual. A therapeutically effective amount is also one in which toxic or detrimental effects of the antibody are outweighed by the therapeutically beneficial effects. A “prophylactically effective amount” refers to an amount effective, at the dosages and for periods of time necessary, to achieve the desired prophylactic result. In some embodiments, the effective amount of an antibody of the invention is from about 0.1 mg/kg (mg of antibody per kg weight of the subject) to about 100 mg/kg. In certain embodiments, an effective amount of an antibody provided therein is about 0.1 mg/kg, about 0.5 mg/kg, about 1 mg/kg, 3 mg/kg, 5 mg/kg, about 10 mg/kg, about 15 mg/kg, about 20 mg/kg, about 25 mg/kg, about 30 mg/kg, about 35 mg/kg, about 40 mg/kg, about 45 mg/kg, about 50 mg/kg, about 60 mg/kg, about 70 mg/kg, about 80 mg/kg about 90 mg/kg or about 100 mg/kg (or a range therein). In some embodiments, “effective amount” as used herein also refers to the amount of an antibody of the invention to achieve a specified result (e.g. inhibition of a hPD-L1 biological activity of a cell).

[0221] The term “epitope” as used herein refers to a localized region on the surface of an antigen, such as hPD-L1 polypeptide or hPD-L1 polypeptide fragment, that is capable of being bound to one or more antigen binding regions of an antibody, and that has antigenic or immunogenic activity in an animal, preferably a mammal, and most preferably in a human, that is capable of eliciting an immune response. An epitope having immunogenic activity is a portion of a polypeptide that elicits an antibody response in an animal. An epitope having antigenic activity is a portion of a polypeptide to which an antibody specifically binds as determined by any method well known in the art, for example, by the immunoassays described herein. Antigenic epitopes need not necessarily be immunogenic. Epitopes usually consist of chemically active surface groupings of molecules such as amino acids or sugar side chains and have specific three dimensional structural characteristics as well as specific charge characteristics. A region of a polypeptide contributing to an epitope may be contiguous amino acids of the polypeptide or the epitope may come together from two or more non-contiguous regions of the polypeptide. The epitope may or may not be a three-dimensional surface feature of the antigen. In certain embodiments, a hPD-L1 epitope is a three-dimensional surface feature of a hPD-L1 polypeptide (e.g. in a trimeric form of a hPD-L1 polypeptide). In other embodiments, a hPD-L1 epitope is linear feature of a hPD-L1 polypeptide (e.g. in a trimeric form or monomeric form of the hPD-L1 polypeptide). Antibodies provided herein may specifically bind to an epitope of the monomeric (denatured) form of hPD-L1, an epitope of the trimeric (native) form of hPD-L1, or both the monomeric (denatured) form and the trimeric (native) form of hPD-L1. In specific embodiments, the antibodies provided herein specifically bind to an epitope of the trimeric form of hPD-L1 but do not specifically bind the monomeric form of hPD-L1.

[0222] The term “excipients” as used herein refers to inert substances which are commonly used as a diluent, vehicle, preservatives, binders, or stabilizing agent for drugs and includes, but not limited to, proteins (e.g. serum albumin, etc.), amino acids (e.g. aspartic acid, glutamic acid, lysine, arginine, glycine, histidine, etc.), fatty acids and phospholipids (e.g. alkyl sulfonates, caprylate, etc.), surfactants (e.g. SDS, polysorbate, nonionic surfactant, etc.), saccharides (e.g. sucrose, maltose, trehalose, etc.) and polyols (e.g. mannitol, sorbitol, etc.). See, also, Remington's Pharmaceutical Sciences (1990) Mack Publishing Co., Easton, Pa., which is hereby incorporated by reference in its entirety.

[0223] As used herein, the term “fixed” or “fixation” refers to a chemical process by which biological tissues are preserved from decay, to prevent autolysis or putrefaction. In general, fixation involves exposing the tissue to chemical compounds such as alcohols or aldehydes such as formaldehyde to terminate ongoing biochemical reactions. In some instances, fixation may also increase the mechanical strength or stability of the treated tissues. The term “unfixed” refers to a tissue that has not been subjected to a chemical process to prevent tissue decay. As used herein, the term “surface expressed” means that the protein is embedded in or spans a cell membrane or is associated with a protein that is embedded in or spans a cell membrane (i.e. a membrane associated protein). In one embodiment, a surface expressed protein includes one or more transmembrane domains. In another embodiment, the protein is associated with the exterior or interior surface of a cell membrane indirectly via association with another membrane spanning protein (i.e. the surface expressed protein is not spanning the cell membrane itself). In general, surface expressed proteins that are integrated into a cell membrane or expressed endogenously within a cell are more likely to fold in the correct conformation than recombinantly produced free forms of the same protein.

[0224] In the context of a peptide or polypeptide, the term “fragment” as used herein refers to a peptide or polypeptide that comprises less than the full length amino acid sequence. Such a fragment may arise, for example, from a truncation at the amino terminus, a truncation at the carboxy terminus, and/or an internal deletion of a residue(s) from the amino acid sequence. Fragments may, for example, result from alternative RNA splicing or from in vivo protease activity. In certain embodiments, PD-L1 fragments include polypeptides comprising an amino acid sequence of at least 5 contiguous amino acid residues, at least 10 contiguous amino acid residues, at least 15 contiguous amino acid residues, at least 20 contiguous amino acid residues, at least 25 contiguous amino acid residues, at least 40 contiguous amino acid residues, at least 50 contiguous amino acid residues, at least 60 contiguous amino residues, at least 70 contiguous amino acid residues, at least 80 contiguous amino acid residues, at least 90 contiguous amino acid residues, at least contiguous 100 amino acid residues, at least 125 contiguous amino acid residues, at least 150 contiguous amino acid residues, at least 175 contiguous amino acid residues, at least 200 contiguous amino acid residues, or at least 250 contiguous amino acid residues of the amino acid sequence of a hPD-L1 polypeptide or an antibody that specifically binds to a hPD-L1 polypeptide. In a specific embodiment, a fragment of a hPD-L1 polypeptide or an antibody that specifically binds to a hPD-L1 antigen retains at least 1, at least 2, or at least 3 functions of the polypeptide or antibody.

[0225] The term “free” refers to a polypeptide, for example, PD-L1 or fragments and variants thereof, that is combined with a buffer, wherein the polypeptide is not associated with a cell surface or cell membrane. As such, the term “free” can refer to a polypeptide that is capable of surface expression (i.e. includes one or more transmembrane domains or membrane association domains), but that is not, in its present state, expressed on the surface of a cell or bound to a protein that is expressed on the surface of a cell. A free polypeptide can also refer to a free recombinant or native or unbound polypeptide. In the context of phage display, a free antigen can be selected in solution (referred to herein as a “soluble selection”) or adsorbed to a surface, for example, adsorbed to the surface of a 96-well plate (referred to herein as “biopanning selection”).

[0226] The term “fusion protein” as used herein refers to a polypeptide that comprises an amino acid sequence of an antibody and an amino acid sequence of a heterologous polypeptide or protein (i.e. a polypeptide or protein not normally a part of the antibody (e.g. a non-anti-hPD-L1 antigen antibody)). The term “fusion” when used in relation to hPD-L1 or to an anti-hPD-L1 antibody refers to the joining of a peptide or polypeptide, or fragment, variant and/or derivative thereof, with a heterologous peptide or polypeptide. Preferably, the fusion protein retains the biological activity of the hPD-L1 or anti-hPD-L1 antibody. In certain embodiments, the fusion protein comprises a hPD-L1 antibody VH domain, VL domain, VH CDR (one, two or three VH CDRs), and/or VL CDR (one, two or three VL CDRs), wherein the fusion protein specifically binds to a hPD-L1 epitope.

[0227] The term “heavy chain” when used with reference to an antibody refers to five distinct types, called alpha (α), delta (δ), epsilon (ε), gamma (γ) and mu (μ), based on the amino acid sequence of the heavy chain constant domain. These distinct types of heavy chains are well known and give rise to five classes of antibodies, IgA, IgD, IgE, IgG and IgM, respectively, including four subclasses of IgG, namely IgG1, IgG2, IgG3 and IgG4. Preferably the heavy chain is a human heavy chain. In the human population, multiple heavy chain constant region alleles, of each immunoglobulin or immunoglobulin subclass, exist. The nucleotide and amino acid sequences of these allelic variants are accessible on publicly available databases such as IMGT, ENSEMBL Swiss-Prot and Uniprot. Allelic variants may also be identified in various genome sequencing projects. In one embodiment, the antibodies and antibody fragments disclosed herein comprise a heavy chain encoded by a IgG1 constant region allele, which includes, but is not limited to, human IGHG1*01 (Seq ID Nos:340, 341 & 537), IGHG1*02 (Seq ID Nos:340, 341 &537), IGHG1*03 (Seq ID Nos:523 & 524), IGHG1*04 (Seq ID Nos:525 & 526) and IGHG1*05 (Seq ID Nos:340, 341 & 537). In one embodiment, the antibodies and antibody fragments disclosed herein comprise a protein encoded by a IgG2 constant region allele, which includes, but is not limited to, human IGHG2*01 (Seq ID Nos:527 & 528), IGHG2*02 (Seq ID Nos:529 & 530), IGHG2*03 (Seq ID Nos:527 & 528), IGHG2*04 (Seq ID Nos:531 & 532), IGHG2*05 (Seq ID Nos:527 & 528) and IGHG2*06 (Seq ID Nos:533 & 534). In one embodiment, the antibodies or antibody fragments disclosed herein comprise a protein encoded by a IgG3 constant region allele, which includes but is not limited to human IGHG3*01, IGHG3*02, IGHG3*03, IGHG3*04, IGHG3*05, IGHG3*06, IGHG3*07, IGHG3*08, IGHG3*09, IGHG3*10, IGHG3*11, IGHG3*12, IGHG3*13, IGHG3*14, IGHG3*15, IGHG3*16, IGHG3*17, IGHG3*18 and IGHG3*19. In one embodiment, the antibodies or antibody fragments disclosed herein comprise a protein encoded by a IgG4 constant region allele, which includes but is not limited to human IGHG4*01 (Seq ID Nos:192 & 193), IGHG4*02 (Seq ID Nos:194 & 195), IGHG4*03 (Seq ID Nos:196 & 197) and IGHG4*04 (Seq ID Nos:192 & 193). In another example, the heavy chain is a disabled IgG isotype, e.g. a disabled IgG4. In certain embodiments, the antibodies of the invention comprise a human gamma 4 constant region. In another embodiment, the heavy chain constant region does not bind Fc-γ receptors, and e.g. comprises a Leu235Glu mutation. In another embodiment, the heavy chain constant region comprises a Ser228Pro mutation to increase stability. In another embodiment, the heavy chain constant region is IgG4-PE (SEQ ID No:199. In another embodiment, the antibodies and antibody fragments disclosed herein comprise a heavy chain constant region encoded by a murine IgG1 constant region allele, which includes but is not limited to mouse IGHG1*01 or IGHG1*02. In one embodiment, the antibodies and antibody fragments disclosed herein comprise a heavy chain constant region encoded by a murine IgG2 constant region allele, which includes, but is not limited to, mouse IGHG2A*01, IGHG2A*02, IGHG2B*01, IGHG2B*02, IGHG2C*01, IGHG2C*02 or IGHG2C*03. In one embodiment, the antibodies or antibody fragments disclosed herein comprise a protein encoded by a murine IgG3 constant region allele, which includes but is not limited to mouse IGHG3*01.

[0228] The term “host” as used herein refers to an animal, preferably a mammal, and most preferably a human.

[0229] The term “host cell” as used herein refers to the particular subject cell transfected with a nucleic acid molecule and the progeny or potential progeny of such a cell. Progeny of such a cell may not be identical to the parent cell transfected with the nucleic acid molecule due to mutations or environmental influences that may occur in succeeding generations or integration of the nucleic acid molecule into the host cell genome.

[0230] The term “an IL-2 cytokine” as used herein refers to a cytokine-like molecule which has a similar activity to a wild-type IL-2. It may have activity at the high (αβγ) affinity IL-2 receptor and/or the intermediate affinity (αβ) IL-2 receptor. The cytokine may be a variant IL-2 cytokine having one or more amino acid deletions, substitutions or additions. Variant cytokines are described in more detail hereinbelow.

[0231] The term “immunomodulatory agent” and variations thereof including, but not limited to, immunomodulatory agents, as used herein refer to an agent that modulates a host's immune system. In certain embodiments, an immunomodulatory agent is an immunosuppressant agent. In certain other embodiments, an immunomodulatory agent is an immunostimulatory agent. In accordance with the invention, an immunomodulatory agent used in the combination therapies of the invention does not include an anti-hPD-L1 antibody or antigen-binding fragment. Immunomodulatory agents include, but are not limited to, small molecules, peptides, polypeptides, proteins, fusion proteins, antibodies, inorganic molecules, mimetic agents, and organic molecules.

[0232] The term “in combination” in the context of the administration of other therapies refers to the use of more than one therapy. The use of the term “in combination” does not restrict the order in which therapies are administered to a subject with a disease. A first therapy can be administered before (e.g. 1 minute, 45 minutes, 30 minutes, 45 minutes, 1 hour, 2 hours, 4 hours, 6 hours, 12 hours, 24 hours, 48 hours, 72 hours, 96 hours, 1 week, 2 weeks, 3 weeks, 4 weeks, 5 weeks, 6 weeks, 8 weeks, or 12 weeks), concurrently, or after (e.g. 1 minute, 45 minutes, 30 minutes, 45 minutes, 1 hour, 2 hours, 4 hours, 6 hours, 12 hours, 24 hours, 48 hours, 72 hours, 96 hours, 1 week, 2 weeks, 3 weeks, 4 weeks, 5 weeks, 6 weeks, 8 weeks, or 12 weeks) the administration of a second therapy to a subject which had, has, or is susceptible to a hPD-L1-mediated disease. Any additional therapy can be administered in any order with the other additional therapies. In certain embodiments, the antibodies of the invention can be administered in combination with one or more therapies (e.g. therapies that are not the antibodies of the invention that are currently administered to prevent, treat, manage, and/or ameliorate a hPD-L1-mediated disease. Non-limiting examples of therapies that can be administered in combination with an antibody of the invention include analgesic agents, anaesthetic agents, antibiotics, or immunomodulatory agents or any other agent listed in the U.S. Pharmacopoeia and/or Physician's Desk Reference.

[0233] The term “immunocytokine”, as used herein refers to an antibody format which is fused to a cytokine molecule. The antibody format may be any of those described herein, and the cytokine may be fused directly, or by means of a linker or chemical conjugation to either the N- or C-terminus of the heavy or the light chain of the antibody format.

[0234] As used herein, “injection device” refers to a device that is designed for carrying out injections, an injection including the steps of temporarily fluidically coupling the injection device to a person's tissue, typically the subcutaneous tissue. An injection further includes administering an amount of liquid drug into the tissue and decoupling or removing the injection device from the tissue. In some embodiments, an injection device can be an intravenous device or IV device, which is a type of injection device used when the target tissue is the blood within the circulatory system, e.g. the blood in a vein. A common, but non-limiting example of an injection device is a needle and syringe.

[0235] As used herein, “instructions” refers to a display of written, printed or graphic matter on the immediate container of an article, for example the written material displayed on a vial containing a pharmaceutically active agent, or details on the composition and use of a product of interest included in a kit containing a composition of interest. Instructions set forth the method of the treatment as contemplated to be administered or performed.

[0236] An “isolated” or “purified” antibody or protein is one that has been identified, separated and/or recovered from a component of its production environment (e.g. natural or recombinant). For example, the antibody or protein is substantially free of cellular material or other contaminating proteins from the cell or tissue source from which the antibody is derived, or substantially free of chemical precursors or other chemicals when chemically synthesized. The language “substantially free of cellular material” includes preparations of an antibody in which the antibody is separated from cellular components of the cells from which it is isolated or recombinantly produced. Thus, an antibody that is substantially free of cellular material includes preparations of antibody having less than about 30%, 20%, 10%, or 5% (by dry weight) of heterologous protein (also referred to herein as a “contaminating protein”). When the antibody is recombinantly produced, it is also preferably substantially free of culture medium, i.e. culture medium represents less than about 20%, 10%, or 5% of the volume of the protein preparation. When the antibody is produced by chemical synthesis, it is preferably substantially free of chemical precursors or other chemicals, i.e., it is separated from chemical precursors or other chemicals which are involved in the synthesis of the protein. Accordingly, such preparations of the antibody have less than about 30%, 20%, 10%, 5% (by dry weight) of chemical precursors or compounds other than the antibody of interest. In a preferred embodiment, antibodies of the invention are isolated or purified.

[0237] The terms “Kabat numbering,” and like terms are recognized in the art and refer to a system of numbering amino acid residues which are more variable (i.e. hypervariable) than other amino acid residues in the heavy chain variable regions of an antibody, or an antigen binding portion thereof (Kabat et al., (1971) Ann. NY Acad. Sci., 190:382-391 and, Kabat et al. (1991) Sequences of Proteins of Immunological Interest, Fifth Edition, U.S. Department of Health and Human Services, NIH Publication No. 91-3242). For the heavy chain variable region, the hypervariable region typically ranges from amino acid positions 31 to 35 for CDR1, amino acid positions 50 to 65 for CDR2, and amino acid positions 95 to 102 for CDR3.

[0238] “Label” or “labelled” as used herein refers to the addition of a detectable moiety to a polypeptide, for example, a radiolabel, fluorescent label, enzymatic label, chemiluminescent label or a biotinyl group or gold. Radioisotopes or radionuclides may include ³H, ¹⁴C, ¹⁵N, ³⁵S, ⁹⁰Y, ⁹⁹Tc, ¹¹⁵In, ¹²⁵I, ¹³¹I, fluorescent labels may include rhodamine, lanthanide phosphors or FITC and enzymatic labels may include horseradish peroxidase, β-galactosidase, luciferase, alkaline phosphatase. Additional labels include, by way of illustration and not limitation: enzymes, such as glucose-6-phosphate dehydrogenase (“G6PDH”), alpha-D-galactosidase, glucose oxydase, glucose amylase, carbonic anhydrase, acetylcholinesterase, lysozyme, malate dehydrogenase and peroxidase; dyes (e.g. cyanine dyes, e.g. Cy5™, Cy5.5™. or Cy7™); additional fluorescent labels or fluorescers include, such as fluorescein and its derivatives, fluorochrome, GFP (GFP for “Green Fluorescent Protein”), other fluorescent proteins (e.g. mCherry, mTomato), dansyl, umbelliferone, phycoerythrin, phycocyanin, allophycocyanin, o-phthaldehyde, and fiuorescamine; fluorophores such as lanthanide cryptates and chelates e.g. Europium etc (Perkin Elmer and Cisbio Assays); chemoluminescent labels or chemiluminescers, such as isoluminol, luminol and the dioxetanes; sensitisers; coenzymes; enzyme substrates; particles, such as latex or carbon particles; metal sol; crystallite; liposomes; cells, etc., which may be further labelled with a dye, catalyst or other detectable group; molecules such as biotin, digoxygenin or 5-bromodeoxyuridine; toxin moieties, such as for example a toxin moiety selected from a group of Pseudomonas exotoxin (PE or a cytotoxic fragment or mutant thereof), Diptheria toxin or a cytotoxic fragment or mutant thereof, a botulinum toxin A, B, C, D, E or F, ricin or a cytotoxic fragment thereof e.g. ricin A, abrin or a cytotoxic fragment thereof, saporin or a cytotoxic fragment thereof, pokeweed antiviral toxin or a cytotoxic fragment thereof and bryodin 1 or a cytotoxic fragment thereof.

[0239] The term “light chain” when used in reference to an antibody refers to the immunoglobulin light chains, of which there are two types in mammals, lambda (λ) and kappa (κ). Preferably, the light chain is a human light chain. Preferably the light chain constant region is a human constant region. In the human population, multiple light chain constant region alleles exist. The nucleotide and amino acid sequences of these allelic variants are accessible on publicly available databases such as IMGT, ENSEMBL, Swiss-Prot and Uniprot. In one embodiment, the antibodies or antibody fragments disclosed herein comprise a protein encoded by a human κ constant region allele, which includes, but is not limited to, IGKC*01 (Seq ID Nos:206 & 207), IGKC*02 (Seq ID Nos:208 & 209), IGKC*03 (Seq ID Nos:210 & 211), IGKC*04 (Seq ID Nos:212 & 213) and IGKC*05 (Seq ID Nos:214 & 215). In one embodiment, the antibodies or antibody fragments disclosed herein comprise a protein encoded by a human A constant region allele, which includes but is not limited to IGLC1*01 (Seq ID Nos:216 & 217), IGLC1*02 (Seq ID Nos:218, 219 & 220), IGLC2*01 (Seq ID Nos:221, 222 & 538), IGLC2*02 (Seq ID Nos:224 & 225), IGLC2*03 (Seq ID Nos:224 & 225), IGLC3*01 (Seq ID Nos:226 & 227), IGLC3*02 (Seq ID Nos:228 & 229), IGLC3*03 (Seq ID Nos:230 & 231), IGLC3*04 (Seq ID Nos:232 & 233), IGLC6*01 (Seq ID Nos:234 & 235), IGLC7*01 (Seq ID Nos:236 & 237), IGLC7*02 (Seq ID Nos:236 & 237), IGLC7*03 (Seq ID Nos:535 & 536). In another embodiment, the antibodies and antibody fragments disclosed herein comprise a light chain constant region encoded by a mouse K constant region allele, which includes, but is not limited to, IGKC*01, IGKC*03 or IGKC*03. In another embodiment, the antibodies and antibody fragments disclosed herein comprise a light chain constant region encoded by a mouse A constant region allele, which includes, but is not limited to, IGLC1*01, IGLC2*01 or IGLC3*01.

[0240] “Percent (%) amino acid sequence identity” and “homology” with respect to a peptide, polypeptide or antibody sequence are defined as the percentage of amino acid residues in a candidate sequence that are identical with the amino acid residues in the specific peptide or polypeptide sequence, after aligning the sequences and introducing gaps, if necessary, to achieve the maximum percent sequence identity, and not considering any conservative substitutions as part of the sequence identity. Alignment for purposes of determining percent amino acid sequence identity can be achieved in various ways that are within the skill in the art, for instance, using publicly available computer software such as BLAST, BLAST-2, ALIGN or MEG ALIGN™ (DNASTAR) software. In one embodiment, the % homology is about 70%. In one embodiment, the % homology is about 75%. In one embodiment, the % homology is about 80%. In one embodiment, the % homology is about 85%. In one embodiment, the % homology is about 90%. In one embodiment, the % homology is about 92%. In one embodiment, the % homology is about 95%. In one embodiment, the % homology is about 97%. In one embodiment, the % homology is about 98%. In one embodiment, the % homology is about 99%. In one embodiment, the % homology is 100%.

[0241] The term “naturally occurring” or “native” when used in connection with biological materials such as nucleic acid molecules, polypeptides, host cells, and the like, refers to those which are found in nature and not manipulated by a human being.

[0242] As used herein, “packaging” refers to how the components are organized and/or restrained into a unit fit for distribution and/or use. Packaging can include, e.g. boxes, bags, syringes, ampoules, vials, tubes, clamshell packaging, barriers and/or containers to maintain sterility, labelling, etc.

[0243] The term “pharmaceutically acceptable” as used herein means being approved by a regulatory agency of the Federal or a state government, or listed in the U.S. Pharmacopeia, European Pharmacopeia or other generally recognized Pharmacopeia for use in animals, and more particularly in humans.

[0244] As used herein, the term “polynucleotide,” “nucleotide,” nucleic acid” “nucleic acid molecule” and other similar terms are used interchangeable and include DNA, RNA, mRNA and the like.

[0245] As used herein, the terms “prevent”, “preventing”, and “prevention” refer to the total or partial inhibition of the development, recurrence, onset or spread of a hPD-L1-mediated disease and/or symptom related thereto, resulting from the administration of a therapy or combination of therapies provided herein (e.g. a combination of prophylactic or therapeutic agents, such as an antibody of the invention).

[0246] The term “soluble” refers to a polypeptide, such as PD-L1 and variants or fragments thereof, that is lacking one or more transmembrane or cytoplasmic domains found in the native or membrane-associated form. In one embodiment, the “soluble” form of PD-L1 lacks both the transmembrane domain and the cytoplasmic domain.

[0247] The term “subject” or “patient” refers to any animal, including, but not limited to, mammals. As used herein, the term “mammal” refers to any vertebrate animal that suckle their young and either give birth to living young (eutharian or placental mammals) or are egg-laying (metatharian or nonplacental mammals). Examples of mammalian species include, but are not limited to, humans and other primates, including non-human primates such as chimpanzees and other apes and monkey species; farm animals such as cattle, sheep, pigs, goats and horses; domestic mammals such as dogs and cats; laboratory animals including rodents such as mice, rats (including cotton rats) and guinea pigs; birds, including domestic, wild and game birds such as chickens, turkeys and other gallinaceous birds, ducks, geese, and the like.

[0248] As used herein “substantially all” refers to refers to at least about 60%, at least about 70%, at least about 75%, at least about 80%, at least about 85%, at least about 90%, at least about 95%, at least about 98%, at least about 99%, or about 100%.

[0249] The term “substantially free of surfactant” as used herein refers to a formulation of an antibody that specifically binds to a hPD-L1 antigen, said formulation containing less than 0.0005%, less than 0.0003%, or less than 0.0001% of surfactants and/or less than 0.0005%, less than 0.0003%, or less than 0.0001% of surfactants.

[0250] The term “substantially free of salt” as used herein refers to a formulation of an antibody that specifically binds to a hPD-L1 antigen, said formulation containing less than 0.0005%, less than 0.0003%, or less than 0.0001% of inorganic salts.

[0251] The term “surfactant” as used herein refers to organic substances having amphipathic structures; namely, they are composed of groups of opposing solubility tendencies, typically an oil-soluble hydrocarbon chain and a water-soluble ionic group. Surfactants can be classified, depending on the charge of the surface-active moiety, into anionic, cationic, and non-ionic surfactants. Surfactants are often used as wetting, emulsifying, solubilizing, and dispersing agents for various pharmaceutical compositions and preparations of biological materials.

[0252] As used herein, the term “tag” refers to any type of moiety that is attached to, e.g. a polypeptide and/or a polynucleotide that encodes a hPD-L1 or hPD-L1 antibody or antigen binding fragment thereof. For example, a polynucleotide that encodes a hPD-L1, hPD-L1 antibody or antigen binding fragment thereof can contain one or more additional tag-encoding nucleotide sequences that encode e.g. a detectable moiety or a moiety that aids in affinity purification. When translated, the tag and the antibody can be in the form of a fusion protein. The term “detectable” or “detection” with reference to a tag refers to any tag that is capable of being visualized or wherein the presence of the tag is otherwise able to be determined and/or measured (e.g. by quantitation). A non-limiting example of a detectable tag is a fluorescent tag.

[0253] As used herein, the term “therapeutic agent” refers to any agent that can be used in the treatment, management or amelioration of a hPD-L1-mediated disease and/or a symptom related thereto. In certain embodiments, the term “therapeutic agent” refers to an antibody of the invention. In certain other embodiments, the term “therapeutic agent” refers to an agent other than an antibody of the invention. Preferably, a therapeutic agent is an agent which is known to be useful for, or has been or is currently being used for the treatment, management or amelioration of a hPD-L1-mediated disease or one or more symptoms related thereto. In specific embodiments, the therapeutic agent is a fully human anti-hPD-L1 antibody, such as a fully human anti-hPD-L1 monoclonal antibody.

[0254] As used herein, the term “therapy” refers to any protocol, method and/or agent that can be used in the prevention, management, treatment and/or amelioration of a hPD-L1-mediated disease (e.g. cancer). In certain embodiments, the terms “therapies” and “therapy” refer to a biological therapy, supportive therapy, and/or other therapies useful in the prevention, management, treatment and/or amelioration of a hPD-L1-mediated disease known to one of skill in the art such as medical personnel.

[0255] The terms “treat”, “treatment” and “treating” refer to the reduction or amelioration of the progression, severity, and/or duration of a hPD-L1-mediated disease (e.g. cancer) resulting from the administration of one or more therapies (including, but not limited to, the administration of one or more prophylactic or therapeutic agents, such as an antibody of the invention). In specific embodiments, such terms refer to the reduction or inhibition of the binding of hPD-L1 to PD-1, the reduction or inhibition of the binding of hPD-L1 to CD80, and/or the inhibition or reduction of one or more symptoms associated with a hPD-L1-mediated disease, such as cancer. In specific embodiments, such terms refer to the reduction or inhibition of the binding of hPD-L1 to PD-1 and/or CD80, and/or the inhibition or reduction of one or more symptoms associated with a hPD-L1-mediated disease, such as cancer. In an example, the cell is a human cell. In specific embodiments, a prophylactic agent is a fully human anti-hPD-L1 antibody, such as a fully human anti-hPD-L1 monoclonal antibody.

[0256] The term “variable region” or “variable domain” refers to a portion of the light and heavy chains, typically about the amino-terminal 120 to 130 amino acids in the heavy chain and about 100 to 110 amino acids in the light chain, which differ extensively in sequence among antibodies and are used in the binding and specificity of each particular antibody for its particular antigen. The variability in sequence is concentrated in those regions called complimentarily determining regions (CDRs) while the more highly conserved regions in the variable domain are called framework regions (FR). The CDRs of the PD-L1 and heavy chains are primarily responsible for the interaction of the antibody with antigen. Numbering of amino acid positions used herein is according to the EU Index, as in Kabat et al. (1991) Sequences of proteins of immunological interest. (U.S. Department of Health and Human Services, Washington, D.C.) 5^{th} ed. (“Kabat et al.”). In preferred embodiments, the variable region is a human variable region.

[0257] Definitions of common terms in cell biology and molecular biology can be found in “The Merck Manual of Diagnosis and Therapy”, 19th Edition, published by Merck Research Laboratories, 2006 (ISBN 0-911910-19-0); Robert S. Porter et al. (eds.), The Encyclopedia of Molecular Biology, published by Blackwell Science Ltd., 1994 (ISBN 0-632-02182-9); Benjamin Lewin, Genes X, published by Jones & Bartlett Publishing, 2009 (ISBN-10: 0763766321); Kendrew et al. (Eds.), Molecular Biology and Biotechnology: a Comprehensive Desk Reference, published by VCH Publishers, Inc., 1995 (ISBN 1-56081-569-8) and Current Protocols in Protein Sciences 2009, Wiley Intersciences, Coligan et al., eds.

[0258] Unless otherwise stated, the present invention was performed using standard procedures, as described, for example in Sambrook et al., Molecular Cloning: A Laboratory Manual (4 ed.), Cold Spring Harbor Laboratory Press, Cold Spring Harbor, N.Y., USA (2012); Davis et al., Basic Methods in Molecular Biology, Elsevier Science Publishing, Inc., New York, USA (1995); or Methods in Enzymology: Guide to Molecular Cloning Techniques Vol. 152, S. L. Berger and A. R. Kimmel Eds., Academic Press Inc., San Diego, USA (1987); Current Protocols in Protein Science (CPPS) (John E. Coligan, et al., ed., John Wiley and Sons, Inc.), Current Protocols in Cell Biology (CPCB) (Juan S. Bonifacino et al. ed., John Wiley and Sons, Inc.), and Culture of Animal Cells: A Manual of Basic Technique by R. Ian Freshney, Publisher: Wiley-Liss; 5th edition (2005), Animal Cell Culture Methods (Methods in Cell Biology, Vol. 57, Jennie P. Mather and David Barnes editors, Academic Press, 1st edition, 1998) which are all incorporated by reference herein in their entireties.

[0259] Other terms are defined herein within the description of the various aspects of the invention.

### 2. PD-L1 Antibodies

[0260] Many tumour cells express surface molecules that are specific to cancer that can serve as diagnostic and/or therapeutic antibody targets. Examples of cell surface proteins expressed by tumour molecules that can be useful as biomarkers include, for example, members of the B7 family of proteins, major histocompatibility complex molecules (MHC), cytokine and growth factor receptors such as the receptor for eipdermal growth factor (EGFR). The B7 family is a group of proteins that are members of the immunoglobulin (Ig) superfamily of cell-surface proteins that bind to receptors on lymphocytes to regulate immune responses. The family includes transmembrane or glycosylphosphatidylinositol (GPI)-linked proteins characterized by extracellular Ig-like domains (IgV and IgC domains related to the variable and constant domains of immunoglobulins). All members have short cytoplasmic domains. There are seven known members of the B7 family: B7-1, B7-2, PD-L1 (B7-H1), PD-L2, B7-H2, B7-H3, and B7-H4.

[0261] The complete amino acid sequence for PD-L1 can be found in NCBI Reference Sequence: NP_054862.1 (SEQ ID No:1), which refers to many journal articles, including, for example, Dong, H., et al. (1999), “PD-L1, a third member of the B7 family, co-stimulates T-cell proliferation and interleukin-10 secretion,” Nat. Med. 5 (12), 1365-1369, the disclosure of which is hereby incorporated by reference herein in its entirety. The amino acid sequence of PD-L1 includes a 30 amino acid long cytoplasmic domain that is unique to PD-L1, which shows little homology to other molecules, including other B7 family members.

[0262] In one embodiment, the antibody is a polyclonal antibody. Methods for generating polyclonal antibodies are known, and include, for example, inoculating a suitable mammal with an antigen to induce the immune system of the animal to produce immunoglobulins (IgGs) that specifically bind the injected antigen. Examples of suitable mammals include, for example, mouse, guinea pig, hamster, rat, rabbit sheep or goat. The polyclonal IgG is then typically purified from the mammal's serum. In one embodiment, the antibody is a polyclonal antibody that binds to a surface expressed protein. In another embodiment, the antibody is a polyclonal antibody that specifically binds to a member of the B7 family of proteins. In a more specific embodiment, the antibody is a polyclonal antibody that specifically binds PD-L1. In another embodiment, the antibody is a polyclonal antibody that specifically binds surface expressed PD-L1. In a more particular embodiment, the polyclonal antibody or antigen binding fragment thereof specifically binds human PD-L1. In another embodiment, the antibody is a polyclonal antibody that specifically binds soluble PD-L1. The term “soluble” also refers to a protein, such as PD-L1 that is lacking one or more transmembrane domain or cytoplasmic domains. In one embodiment, the “soluble” form of PD-L1 lacks both the transmembrane domain and the cytoplasmic domain. In one embodiment, the antibody is a polyclonal antibody that binds “free” PD-L1 (i.e. PD-L1 that is not associated with a cell membrane or surface, either directly or indirectly).

[0263] In another embodiment, the antibody can be a monoclonal antibody. Methods of making monoclonal antibodies are known and include, for example, fusing myeloma cells with the cells from an animal that was immunized with the desired antigen. In other embodiments, the monoclonal antibodies may be generated using recombinant DNA technology. In one embodiment, the antibody is a monoclonal antibody that specifically binds a surface expressed protein. In one embodiment, the antibody is a fully human monoclonal antibody. In another embodiment, the antibody is a monoclonal antibody that specifically binds to a member of the B7 family of proteins. In a more specific embodiment, the antibody is a monoclonal antibody that specifically binds PD-L1. In another embodiment, the antibody is a monoclonal antibody that specifically binds surface expressed PD-L1. In a more particular embodiment, the monoclonal antibody or antigen binding fragment thereof specifically binds human PD-L1. In another embodiment, the antibody is a monoclonal antibody that specifically binds soluble PD-L1. In one embodiment, the antibody is a monoclonal antibody that specifically binds soluble PD-L1 that is lacking one or more transmembrane domain or cytoplasmic domains. In one embodiment, the antibody is a monoclonal antibody that specifically binds soluble PD-L1 that is lacking both the transmembrane domain and the cytoplasmic domain. In one embodiment, the antibody is a monoclonal antibody that binds “free” PD-L1 (i.e. PD-L1 that is not associated with a cell membrane or surface, either directly or indirectly).

[0264] In an example the binding site(s) of the antibody or fragment are selected from a plurality (e.g. library) of binding sites. For example, the plurality of binding sites comprises or consists of a plurality of 4-chain antibodies or fragments thereof, e.g. dAbs, Fabs or scFvs. Suitable methods for producing pluralities of binding sites for screening include phage display (producing a phage display library of antibody binding sites), ribosome display (producing a ribosome display library of antibody binding sites), yeast display (producing a yeast display library of antibody binding sites), or immunisation of a non-human vertebrate (e.g. a rodent, e.g. a mouse or rat, e.g. a Velocimouse™, Kymouse™, Xenomouse™, Aliva Mouser™, HuMab Mouse™, Omnimouse™, Omnirat™ or MeMo Mouse™) with hPD-L1 or a hPD-L1 epitope and isolation of a repertoire of antibody-producing cells (e.g. a B-cell, plasma cell or plasmablast repertoire) and/or a repertoire of isolated antibodies, fragments or binding sites.

[0265] PD-L1 binding ability, specificity and affinity (Kd, K_{off} and/or Kₒₙ) can be determined by any routine method in the art, e.g. by surface plasmon resonance (SPR). The term “Kd” or “K_{D}”, as used herein, is intended to refer to the equilibrium dissociation constant of a particular antibody-antigen interaction. Such binding measurements can be made using a variety of binding assays known in the art, e.g. using surface plasmon resonance (SPR), such as by Biacorem or using the ProteOn XPR36™ (Bio-Rad®), using KinExA® (Sapidyne Instruments, Inc), or using ForteBio Octet (Pall ForteBio Corp.).

[0266] In one embodiment, the surface plasmon resonance (SPR) is carried out at 25° C. In another embodiment, the SPR is carried out at 37° C.

[0267] In one embodiment, the SPR is carried out at physiological pH, such as about pH7 or at pH7.6 (e.g. using Hepes buffered saline at pH 7.6 (also referred to as HBS-EP)).

[0268] In one embodiment, the SPR is carried out at a physiological salt level, e.g. 150 mM NaCl.

[0269] In one embodiment, the SPR is carried out at a detergent level of no greater than 0.05% by volume, e.g. in the presence of P20 (polysorbate 20; e.g. Tween 20™) at 0.05% and EDTA at 3 mM.

[0270] In one example, the SPR is carried out at 25° C. or 37° C. in a buffer at pH 7.6, 150 mM NaCl, 0.05% detergent (e.g. P20) and 3 mM EDTA. The buffer can contain 10 mM Hepes. In one example, the SPR is carried out at 25° C. or 37° C. in HBS-EP. HBS-EP is available from Teknova Inc. (California; catalogue number H8022).

[0271] In an example, the affinity of the antibody or fragment is determined using SPR by:
[0272] 1. Coupling anti-mouse (or other relevant human, rat or non-human vertebrate antibody constant region species-matched) IgG (e.g. Biacore™ BR-1008-38) to a biosensor chip (e.g. GLM chip) such as by primary amine coupling;
[0273] 2. Exposing the anti-mouse IgG (or other matched species antibody) to a test IgG antibody to capture test antibody on the chip;
[0274] 3. Passing the test antigen over the chip's capture surface at 1024 nM, 256 nM, 64 nM, 16 nM, 4 nM with a 0 nM (i.e. buffer alone); and
[0275] 4. And determining the affinity of binding of test antibody to test antigen using surface plasmon resonance, e.g. under an SPR condition discussed above (e.g. at 25° C. in physiological buffer). SPR can be carried out using any standard SPR apparatus, such as by Biacore™ or using the ProteOn XPR36™ (Bio-Rad®).

[0276] Regeneration of the capture surface can be carried out with 10 mM glycine at pH 1.7. This removes the captured antibody and allows the surface to be used for another interaction. The binding data can be fitted to 1:1 model inherent using standard techniques, e.g. using a model inherent to the ProteOn XPR36™ analysis software.

[0277] The present inventors have identified a number of antibodies having specificity for hPD-L1, which have a number of potential utilities and benefits over existing antibodies. For example, the antibodies described herein may have one or more of the following properties:
[0278] a. Specificity for blocking only one of the ligands of PD-L1 (e.g. blocks CD80/PD-L1 interaction, but not PD-1/PD-L1 interaction)
[0279] b. Immunogenicity/lack of side effects
[0280] c. Solubility
[0281] d. Stability
[0282] e. Ease of formulation
[0283] f. Frequency of dosing and/or route of administration, for example due to improved half-life over existing anti-PDL1 antibodies
[0284] g. Manufacturability (e.g. expression, ease of purification, isoforms)

[0285] 1D05 has a heavy chain variable region (V_{H}) amino acid sequence of Seq ID No:33, comprising the CDRH1 amino acid sequence of Seq ID No:27 (IMGT) or Seq ID No:30 (Kabat), the CDRH2 amino acid sequence of Seq ID No:28 (IMGT) or Seq ID No:31 (Kabat), and the CDRH3 amino acid sequence of Seq ID No:29 (IMGT) or Seq ID No:32 (Kabat). The heavy chain nucleic acid sequence of the V_{H} domain is Seq ID No:34. 1D05 has a light chain variable region (V_{L}) amino acid sequence of Seq ID No:43, comprising the CDRL1 amino acid sequence of Seq ID No:37 (IMGT) or Seq ID No:40 (Kabat), the CDRL2 amino acid sequence of Seq ID No:38 (IMGT) or Seq ID No:41 (Kabat), and the CDRL3 amino acid sequence of Seq ID No:39 (IMGT) or Seq ID No:42 (Kabat). The light chain nucleic acid sequence of the V_{L} domain is Seq ID No:44. The V_{H} domain may be combined with any of the heavy chain constant region sequences described herein, e.g. Seq ID No:193, Seq ID No:195, Seq ID No:197, Seq ID No:199, Seq ID No:201, Seq ID No:203, Seq ID No:205, Seq ID No:340, Seq ID No:524, Seq ID No:526, Seq ID No:528, Seq ID No:530, Seq ID No:532 or Seq ID No:534. The V_{L} domain may be combined with any of the light chain constant region sequences described herein, e.g. Seq ID Nos:207, 209, 211, 213, 215, 217, 219, 221, 223, 225, 227, 229, 231, 233, 235, 237, 536 and 538. A full length heavy chain amino acid sequence is Seq ID No:35 (heavy chain nucleic acid sequence Seq ID No:36). A full length light chain amino acid sequence is Seq ID No:45 (light chain nucleic acid sequence Seq ID No:46).

[0286] 84G09 has a heavy chain variable (V_{H}) region amino acid sequence of Seq ID No:13, comprising the CDRH1 amino acid sequence of Seq ID No:7 (IMGT) or Seq ID No:10 (Kabat), the CDRH2 amino acid sequence of Seq ID No:8 (IMGT) or Seq ID No:11 (Kabat), and the CDRH3 amino acid sequence of Seq ID No:9 (IMGT) or Seq ID No:12 (Kabat). The heavy chain nucleic acid sequence of the V_{H} domain is Seq ID No:14. 84G09 has a light chain variable region (V_{L}) amino acid sequence of Seq ID No:23, comprising the CDRL1 amino acid sequence of Seq ID No:17 (IMGT) or Seq ID No:20 (Kabat), the CDRL2 amino acid sequence of Seq ID No:18 (IMGT) or Seq ID No:21 (Kabat), and the CDRL3 amino acid sequence of Seq ID No:19 (IMGT) or Seq ID No:22 (Kabat). The light chain nucleic acid sequence of the V_{L} domain is Seq ID No:24. The V_{H} domain may be combined with any of the heavy chain constant region sequences described herein, e.g. Seq ID No:193, Seq ID No:195, Seq ID No:197, Seq ID No:199, Seq ID No:201, Seq ID No:203, Seq ID No:205, Seq ID No:340, Seq ID No:524, Seq ID No:526, Seq ID No:528, Seq ID No:530, Seq ID No:532 or Seq ID No:534. The V_{L} domain may be combined with any of the light chain constant region sequences described herein, e.g. Seq ID Nos:207, 209, 211, 213, 215, 217, 219, 221, 223, 225, 227, 229, 231, 233, 235, 237, 536 and 538. A full length heavy chain amino acid sequence is Seq ID No:15 (heavy chain nucleic acid sequence Seq ID No:16). A full length light chain amino acid sequence is Seq ID No:25 (light chain nucleic acid sequence Seq ID No:26).

[0287] 1D05 HC mutant 1 has a heavy chain variable (V_{H}) region amino acid sequence of Seq ID No:47, comprising the CDRH1 amino acid sequence of Seq ID No:27 (IMGT) or Seq ID No:30 (Kabat), the CDRH2 amino acid sequence of Seq ID No:28 (IMGT) or Seq ID No:31 (Kabat), and the CDRH3 amino acid sequence of Seq ID No:29 (IMGT) or Seq ID No:32 (Kabat). 1D05 HC mutant 1 has a light chain variable region (V_{L}) amino acid sequence of Seq ID No:43, comprising the CDRL1 amino acid sequence of Seq ID No:37 (IMGT) or Seq ID No:40 (Kabat), the CDRL2 amino acid sequence of Seq ID No:38 (IMGT) or Seq ID No:41 (Kabat), and the CDRL3 amino acid sequence of Seq ID No:39 (IMGT) or Seq ID No:42 (Kabat). The light chain nucleic acid sequence of the V_{L} domain is Seq ID No:44. The V_{H} domain may be combined with any of the heavy chain constant region sequences described herein, e.g. Seq ID No:193, Seq ID No:195, Seq ID No:197, Seq ID No:199, Seq ID No:201, Seq ID No:203, Seq ID No:205, Seq ID No:340, Seq ID No:524, Seq ID No:526, Seq ID No:528, Seq ID No:530, Seq ID No:532 or Seq ID No:534. The V_{L} domain may be combined with any of the light chain constant region sequences described herein, e.g. Seq ID Nos:207, 209, 211, 213, 215, 217, 219, 221, 223, 225, 227, 229, 231, 233, 235, 237, 536 and 538. A full length light chain amino acid sequence is Seq ID No:45 (light chain nucleic acid sequence Seq ID No:46).

[0288] 1D05 HC mutant 2 has a heavy chain variable (V_{H}) region amino acid sequence of Seq ID No:48, comprising the CDRH1 amino acid sequence of Seq ID No:27 (IMGT) or Seq ID No:30 (Kabat), the CDRH2 amino acid sequence of Seq ID No:28 (IMGT) or Seq ID No:31 (Kabat), and the CDRH3 amino acid sequence of Seq ID No:29 (IMGT) or Seq ID No:32 (Kabat). 1D05 HC mutant 2 has a light chain variable region (V_{L}) amino acid sequence of Seq ID No:43, comprising the CDRL1 amino acid sequence of Seq ID No:37 (IMGT) or Seq ID No:40 (Kabat), the CDRL2 amino acid sequence of Seq ID No:38 (IMGT) or Seq ID No:41 (Kabat), and the CDRL3 amino acid sequence of Seq ID No:39 (IMGT) or Seq ID No:42 (Kabat). The light chain nucleic acid sequence of the V_{L} domain is Seq ID No:44. The V_{H} domain may be combined with any of the heavy chain constant region sequences described herein, e.g. Seq ID No:193, Seq ID No:195, Seq ID No:197, Seq ID No:199, Seq ID No:201, Seq ID No:203, Seq ID No:205, Seq ID No:340, Seq ID No:524, Seq ID No:526, Seq ID No:528, Seq ID No:530, Seq ID No:532 or Seq ID No:534. The V_{L} domain may be combined with any of the light chain constant region sequences described herein, e.g. Seq ID Nos:207, 209, 211, 213, 215, 217, 219, 221, 223, 225, 227, 229, 231, 233, 235, 237, 536 and 538. A full length light chain amino acid sequence is Seq ID No:45 (light chain nucleic acid sequence Seq ID No:46).

[0289] 1D05 HC mutant 3 has a heavy chain variable (V_{H}) region amino acid sequence of Seq ID No:49, comprising the CDRH1 amino acid sequence of Seq ID No:27 (IMGT) or Seq ID No:30 (Kabat), the CDRH2 amino acid sequence of Seq ID No:28 (IMGT) or Seq ID No:31 (Kabat), and the CDRH3 amino acid sequence of Seq ID No:29 (IMGT) or Seq ID No:32 (Kabat). 1D05 HC mutant 3 has a light chain variable region (V_{L}) amino acid sequence of Seq ID No:43, comprising the CDRL1 amino acid sequence of Seq ID No:37 (IMGT) or Seq ID No:40 (Kabat), the CDRL2 amino acid sequence of Seq ID No:38 (IMGT) or Seq ID No:41 (Kabat), and the CDRL3 amino acid sequence of Seq ID No:39 (IMGT) or Seq ID No:42 (Kabat). The light chain nucleic acid sequence of the V_{L} domain is Seq ID No:44. The V_{H} domain may be combined with any of the heavy chain constant region sequences described herein, e.g. Seq ID No:193, Seq ID No:195, Seq ID No:197, Seq ID No:199, Seq ID No:201, Seq ID No:203, Seq ID No:205, Seq ID No:340, Seq ID No:524, Seq ID No:526, Seq ID No:528, Seq ID No:530, Seq ID No:532 or Seq ID No:534. The V_{L} domain may be combined with any of the light chain constant region sequences described herein, e.g. Seq ID Nos:207, 209, 211, 213, 215, 217, 219, 221, 223, 225, 227, 229, 231, 233, 235, 237, 536 and 538. A full length light chain amino acid sequence is Seq ID No:45 (light chain nucleic acid sequence Seq ID No:46).

[0290] 1D05 HC mutant 4 has a heavy chain variable (V_{H}) region amino acid sequence of Seq ID No:342, comprising the CDRH1 amino acid sequence of Seq ID No:27 (IMGT) or Seq ID No:30 (Kabat), the CDRH2 amino acid sequence of Seq ID No:28 (IMGT) or Seq ID No:31 (Kabat), and the CDRH3 amino acid sequence of Seq ID No:29 (IMGT) or Seq ID No:32 (Kabat). 1D05 HC mutant 4 has a light chain variable region (V_{L}) amino acid sequence of Seq ID No:43, comprising the CDRL1 amino acid sequence of Seq ID No:37 (IMGT) or Seq ID No:40 (Kabat), the CDRL2 amino acid sequence of Seq ID No:38 (IMGT) or Seq ID No:41 (Kabat), and the CDRL3 amino acid sequence of Seq ID No:39 (IMGT) or Seq ID No:42 (Kabat). The light chain nucleic acid sequence of the V_{L} domain is Seq ID No:44. The V_{H} domain may be combined with any of the heavy chain constant region sequences described herein, e.g. Seq ID No:193, Seq ID No:195, Seq ID No:197, Seq ID No:199, Seq ID No:201, Seq ID No:203, Seq ID No:205, Seq ID No:340, Seq ID No:524, Seq ID No:526, Seq ID No:528, Seq ID No:530, Seq ID No:532 or Seq ID No:534. The V_{L} domain may be combined with any of the light chain constant region sequences described herein, e.g. Seq ID Nos:207, 209, 211, 213, 215, 217, 219, 221, 223, 225, 227, 229, 231, 233, 235, 237, 536 and 538. A full length light chain amino acid sequence is Seq ID No:45 (light chain nucleic acid sequence Seq ID No:46).

[0291] 1D05 LC mutant 1 has a heavy chain variable (V_{H}) region amino acid sequence of Seq ID No:33, comprising the CDRH1 amino acid sequence of Seq ID No:27 (IMGT) or Seq ID No:30 (Kabat), the CDRH2 amino acid sequence of Seq ID No:28 (IMGT) or Seq ID No:31 (Kabat), and the CDRH3 amino acid sequence of Seq ID No:29 (IMGT) or Seq ID No:32 (Kabat). The heavy chain nucleic acid sequence of the V_{H} domain is Seq ID No:34. 1D05 LC mutant 1 has a light chain variable region (V_{L}) amino acid sequence of Seq ID No:50, comprising the CDRL1 amino acid sequence of Seq ID No:37 (IMGT) or Seq ID No:40 (Kabat), and the CDRL3 amino acid sequence of Seq ID No:39 (IMGT) or Seq ID No:42 (Kabat). The CDRL2 sequence of 1D05 LC Mutant 1 is as defined by the Kabat or IMGT systems from the V_{L} sequence of Seq ID No:50. The V_{H} domain may be combined with any of the heavy chain constant region sequences described herein, e.g. Seq ID No:193, Seq ID No:195, Seq ID No:197, Seq ID No:199, Seq ID No:201, Seq ID No:203, Seq ID No:205, Seq ID No:340, Seq ID No:524, Seq ID No:526, Seq ID No:528, Seq ID No:530, Seq ID No:532 or Seq ID No:534. The V_{L} domain may be combined with any of the light chain constant region sequences described herein, e.g. Seq ID Nos:207, 209, 211, 213, 215, 217, 219, 221, 223, 225, 227, 229, 231, 233, 235, 237, 536 and 538. A full length heavy chain amino acid sequence is Seq ID No:35 (heavy chain nucleic acid sequence Seq ID No:36).

[0292] 1D05 LC mutant 2 has a heavy chain variable (V_{H}) region amino acid sequence of Seq ID No:33, comprising the CDRH1 amino acid sequence of Seq ID No:27 (IMGT) or Seq ID No:30 (Kabat), the CDRH2 amino acid sequence of Seq ID No:28 (IMGT) or Seq ID No:31 (Kabat), and the CDRH3 amino acid sequence of Seq ID No:29 (IMGT) or Seq ID No:32 (Kabat). The heavy chain nucleic acid sequence of the V_{H} domain is Seq ID No:34. 1D05 LC mutant 2 has a light chain variable region (V_{L}) amino acid sequence of Seq ID No:51, comprising the CDRL1 amino acid sequence of Seq ID No:37 (IMGT) or Seq ID No:40 (Kabat), the CDRL2 amino acid sequence of Seq ID No:38 (IMGT) or Seq ID No:41 (Kabat), and the CDRL3 amino acid sequence of Seq ID No:39 (IMGT) or Seq ID No:42 (Kabat). The V_{H} domain may be combined with any of the heavy chain constant region sequences described herein, e.g. Seq ID No:193, Seq ID No:195, Seq ID No:197, Seq ID No:199, Seq ID No:201, Seq ID No:203, Seq ID No:205, Seq ID No:340, Seq ID No:524, Seq ID No:526, Seq ID No:528, Seq ID No:530, Seq ID No:532 or Seq ID No:534. The V_{L} domain may be combined with any of the light chain constant region sequences described herein, e.g. Seq ID Nos:207, 209, 211, 213, 215, 217, 219, 221, 223, 225, 227, 229, 231, 233, 235, 237, 536 and 538. A full length heavy chain amino acid sequence is Seq ID No:35 (heavy chain nucleic acid sequence Seq ID No:36).

[0293] 1D05 LC mutant 3 has a heavy chain variable (V_{H}) region amino acid sequence of Seq ID No:33, comprising the CDRH1 amino acid sequence of Seq ID No:27 (IMGT) or Seq ID No:30 (Kabat), the CDRH2 amino acid sequence of Seq ID No:28 (IMGT) or Seq ID No:31 (Kabat), and the CDRH3 amino acid sequence of Seq ID No:29 (IMGT) or Seq ID No:32 (Kabat). The heavy chain nucleic acid sequence of the V_{H} domain is Seq ID No:34. 1D05 LC mutant 3 has a light chain variable region (V_{L}) amino acid sequence of Seq ID No:298, comprising the CDRL1 amino acid sequence of Seq ID No:37 (IMGT) or Seq ID No:40 (Kabat), and the CDRL3 amino acid sequence of Seq ID No:39 (IMGT) or Seq ID No:42 (Kabat). The CDRL2 sequence of 1D05 LC Mutant 3 is as defined by the Kabat or IMGT systems from the V_{L} sequence of Seq ID No:298. The light chain nucleic acid sequence of the V_{L} domain is Seq ID No:44. The V_{H} domain may be combined with any of the heavy chain constant region sequences described herein, e.g. Seq ID No:193, Seq ID No:195, Seq ID No:197, Seq ID No:199, Seq ID No:201, Seq ID No:203, Seq ID No:205, Seq ID No:340, Seq ID No:524, Seq ID No:526, Seq ID No:528, Seq ID No:530, Seq ID No:532 or Seq ID No:534. The V_{L} domain may be combined with any of the light chain constant region sequences described herein, e.g. Seq ID Nos:207, 209, 211, 213, 215, 217, 219, 221, 223, 225, 227, 229, 231, 233, 235, 237, 536 and 538. A full length heavy chain amino acid sequence is Seq ID No:35 (heavy chain nucleic acid sequence Seq ID No:36). A full length light chain amino acid sequence is Seq ID No:45 (light chain nucleic acid sequence Seq ID No:46).

[0294] 411B08 has a heavy chain variable (V_{H}) region amino acid sequence of Seq ID No:58, comprising the CDRH1 amino acid sequence of Seq ID No:52 (IMGT) or Seq ID No:55 (Kabat), the CDRH2 amino acid sequence of Seq ID No:53 (IMGT) or Seq ID No:56 (Kabat), and the CDRH3 amino acid sequence of Seq ID No:54 (IMGT) or Seq ID No:57 (Kabat). The heavy chain nucleic acid sequence of the V_{H} domain is Seq ID No:59. 411B08 has a light chain variable region (V_{L}) amino acid sequence of Seq ID No:68, comprising the CDRL1 amino acid sequence of Seq ID No:62 (IMGT) or Seq ID No:65 (Kabat), the CDRL2 amino acid sequence of Seq ID No:63 (IMGT) or Seq ID No:66 (Kabat), and the CDRL3 amino acid sequence of Seq ID No:64 (IMGT) or Seq ID No:67 (Kabat). The light chain nucleic acid sequence of the V_{L} domain is Seq ID No:69. The V_{H} domain may be combined with any of the heavy chain constant region sequences described herein, e.g. Seq ID No:193, Seq ID No:195, Seq ID No:197, Seq ID No:199, Seq ID No:201, Seq ID No:203, Seq ID No:205, Seq ID No:340, Seq ID No:524, Seq ID No:526, Seq ID No:528, Seq ID No:530, Seq ID No:532 or Seq ID No:534. The V_{L} domain may be combined with any of the light chain constant region sequences described herein, e.g. Seq ID Nos:207, 209, 211, 213, 215, 217, 219, 221, 223, 225, 227, 229, 231, 233, 235, 237, 536 and 538. A full length heavy chain amino acid sequence is Seq ID No:60 (heavy chain nucleic acid sequence Seq ID No:61). A full length light chain amino acid sequence is Seq ID No:70 (light chain nucleic acid sequence Seq ID No:71).

[0295] 411C04 has a heavy chain variable (V_{H}) region amino acid sequence of Seq ID No:78, comprising the CDRH1 amino acid sequence of Seq ID No:72 (IMGT) or Seq ID No:75 (Kabat), the CDRH2 amino acid sequence of Seq ID No:73 (IMGT) or Seq ID No:76 (Kabat), and the CDRH3 amino acid sequence of Seq ID No:74 (IMGT) or Seq ID No:77 (Kabat). The heavy chain nucleic acid sequence of the V_{H} domain is Seq ID No:79. 411C04 has a light chain variable region (V_{L}) amino acid sequence of Seq ID No:88, comprising the CDRL1 amino acid sequence of Seq ID No:82 (IMGT) or Seq ID No:85 (Kabat), the CDRL2 amino acid sequence of Seq ID No:83 (IMGT) or Seq ID No:86 (Kabat), and the CDRL3 amino acid sequence of Seq ID No:84 (IMGT) or Seq ID No:87 (Kabat). The light chain nucleic acid sequence of the V_{L} domain is Seq ID No:89. The V_{H} domain may be combined with any of the heavy chain constant region sequences described herein, e.g. Seq ID No:193, Seq ID No:195, Seq ID No:197, Seq ID No:199, Seq ID No:201, Seq ID No:203, Seq ID No:205, Seq ID No:340, Seq ID No:524, Seq ID No:526, Seq ID No:528, Seq ID No:530, Seq ID No:532 or Seq ID No:534. The V_{L} domain may be combined with any of the light chain constant region sequences described herein, e.g. Seq ID Nos:207, 209, 211, 213, 215, 217, 219, 221, 223, 225, 227, 229, 231, 233, 235, 237, 536 and 538. A full length heavy chain amino acid sequence is Seq ID No:80 (heavy chain nucleic acid sequence Seq ID No:81). A full length light chain amino acid sequence is Seq ID No:90 (light chain nucleic acid sequence Seq ID No:91).

[0296] 411D07 has a heavy chain variable (V_{H}) region amino acid sequence of Seq ID No:98, comprising the CDRH1 amino acid sequence of Seq ID No:92 (IMGT) or Seq ID No:95 (Kabat), the CDRH2 amino acid sequence of Seq ID No:93 (IMGT) or Seq ID No:96 (Kabat), and the CDRH3 amino acid sequence of Seq ID No:94 (IMGT) or Seq ID No:97 (Kabat). The heavy chain nucleic acid sequence of the V_{H} domain is Seq ID No:99. 411D07 has a light chain variable region (V_{L}) amino acid sequence of Seq ID No:108, comprising the CDRL1 amino acid sequence of Seq ID No:102 (IMGT) or Seq ID No:105 (Kabat), the CDRL2 amino acid sequence of Seq ID No:103 (IMGT) or Seq ID No:106 (Kabat), and the CDRL3 amino acid sequence of Seq ID No:104 (IMGT) or Seq ID No:107 (Kabat). The light chain nucleic acid sequence of the V_{L} domain is Seq ID No:109. The V_{H} domain may be combined with any of the heavy chain constant region sequences described herein, e.g. Seq ID No:193, Seq ID No:195, Seq ID No:197, Seq ID No:199, Seq ID No:201, Seq ID No:203, Seq ID No:205, Seq ID No:340, Seq ID No:524, Seq ID No:526, Seq ID No:528, Seq ID No:530, Seq ID No:532 or Seq ID No:534. The V_{L} domain may be combined with any of the light chain constant region sequences described herein, e.g. Seq ID Nos:207, 209, 211, 213, 215, 217, 219, 221, 223, 225, 227, 229, 231, 233, 235, 237, 536 and 538. A full length heavy chain amino acid sequence is Seq ID No:100 (heavy chain nucleic acid sequence Seq ID No:101). A full length light chain amino acid sequence is Seq ID No:110 (light chain nucleic acid sequence Seq ID No:111).

[0297] 385F01 has a heavy chain variable (V_{H}) region amino acid sequence of Seq ID No:118, comprising the CDRH1 amino acid sequence of Seq ID No:112 (IMGT) or Seq ID No:115 (Kabat), the CDRH2 amino acid sequence of Seq ID No:113 (IMGT) or Seq ID No:116 (Kabat), and the CDRH3 amino acid sequence of Seq ID No:114 (IMGT) or Seq ID No:117 (Kabat). The heavy chain nucleic acid sequence of the V_{H} domain is Seq ID No:119. 385F01 has a light chain variable region (V_{L}) amino acid sequence of Seq ID No:128, comprising the CDRL1 amino acid sequence of Seq ID No:122 (IMGT) or Seq ID No:125 (Kabat), the CDRL2 amino acid sequence of Seq ID No:123 (IMGT) or Seq ID No:126 (Kabat), and the CDRL3 amino acid sequence of Seq ID No:124 (IMGT) or Seq ID No:127 (Kabat). The light chain nucleic acid sequence of the V_{L} domain is Seq ID No:129. The V_{H} domain may be combined with any of the heavy chain constant region sequences described herein, e.g. Seq ID No:193, Seq ID No:195, Seq ID No:197, Seq ID No:199, Seq ID No:201, Seq ID No:203, Seq ID No:205, Seq ID No:340, Seq ID No:524, Seq ID No:526, Seq ID No:528, Seq ID No:530, Seq ID No:532 or Seq ID No:534. The V_{L} domain may be combined with any of the light chain constant region sequences described herein, e.g. Seq ID Nos:207, 209, 211, 213, 215, 217, 219, 221, 223, 225, 227, 229, 231, 233, 235, 237, 536 and 538. A full length heavy chain amino acid sequence is Seq ID No:120 (heavy chain nucleic acid sequence Seq ID No:121). A full length light chain amino acid sequence is Seq ID No:130 (light chain nucleic acid sequence Seq ID No:131).

[0298] 386H03 has a heavy chain variable (V_{H}) region amino acid sequence of Seq ID No:158, comprising the CDRH1 amino acid sequence of Seq ID No:152 (IMGT) or Seq ID No:155 (Kabat), the CDRH2 amino acid sequence of Seq ID No:153 (IMGT) or Seq ID No:156 (Kabat), and the CDRH3 amino acid sequence of Seq ID No:154 (IMGT) or Seq ID No:157 (Kabat). The heavy chain nucleic acid sequence of the V_{H} domain is Seq ID No:159. 386H03 has a light chain variable region (V_{L}) amino acid sequence of Seq ID No:168, comprising the CDRL1 amino acid sequence of Seq ID No:162 (IMGT) or Seq ID No:165 (Kabat), the CDRL2 amino acid sequence of Seq ID No:163 (IMGT) or Seq ID No:166 (Kabat), and the CDRL3 amino acid sequence of Seq ID No:164 (IMGT) or Seq ID No:167 (Kabat). The light chain nucleic acid sequence of the V_{L} domain is Seq ID No:169. The V_{H} domain may be combined with any of the heavy chain constant region sequences described herein, e.g. Seq ID No:193, Seq ID No:195, Seq ID No:197, Seq ID No:199, Seq ID No:201, Seq ID No:203, Seq ID No:205, Seq ID No:340, Seq ID No:524, Seq ID No:526, Seq ID No:528, Seq ID No:530, Seq ID No:532 or Seq ID No:534. The V_{L} domain may be combined with any of the light chain constant region sequences described herein, e.g. Seq ID Nos:207, 209, 211, 213, 215, 217, 219, 221, 223, 225, 227, 229, 231, 233, 235, 237, 536 and 538. A full length heavy chain amino acid sequence is Seq ID No:160 (heavy chain nucleic acid sequence Seq ID No:161). A full length light chain amino acid sequence is Seq ID No:170 (light chain nucleic acid sequence Seq ID No:171).

[0299] 389A03 has a heavy chain variable (V_{H}) region amino acid sequence of Seq ID No:178, comprising the CDRH1 amino acid sequence of Seq ID No:172 (IMGT) or Seq ID No:175 (Kabat), the CDRH2 amino acid sequence of Seq ID No:173 (IMGT) or Seq ID No:176 (Kabat), and the CDRH3 amino acid sequence of Seq ID No:174 (IMGT) or Seq ID No:177 (Kabat). The heavy chain nucleic acid sequence of the V_{H} domain is Seq ID No:179. 389A03 has a light chain variable region (V_{L}) amino acid sequence of Seq ID No:188, comprising the CDRL1 amino acid sequence of Seq ID No:182 (IMGT) or Seq ID No:185 (Kabat), the CDRL2 amino acid sequence of Seq ID No:183 (IMGT) or Seq ID No:186 (Kabat), and the CDRL3 amino acid sequence of Seq ID No:184 (IMGT) or Seq ID No:187 (Kabat). The light chain nucleic acid sequence of the V_{L} domain is Seq ID No:189. The V_{H} domain may be combined with any of the heavy chain constant region sequences described herein, e.g. Seq ID No:193, Seq ID No:195, Seq ID No:197, Seq ID No:199, Seq ID No:201, Seq ID No:203, Seq ID No:205, Seq ID No:340, Seq ID No:524, Seq ID No:526, Seq ID No:528, Seq ID No:530, Seq ID No:532 or Seq ID No:534. The V_{L} domain may be combined with any of the light chain constant region sequences described herein, e.g. Seq ID Nos:207, 209, 211, 213, 215, 217, 219, 221, 223, 225, 227, 229, 231, 233, 235, 237, 536 and 538. A full length heavy chain amino acid sequence is Seq ID No:180 (heavy chain nucleic acid sequence Seq ID No:181). A full length light chain amino acid sequence is Seq ID No:190 (light chain nucleic acid sequence Seq ID No:191).

[0300] 413D08 has a heavy chain variable (V_{H}) region amino acid sequence of Seq ID No:138, comprising the CDRH1 amino acid sequence of Seq ID No:132 (IMGT) or Seq ID No:135 (Kabat), the CDRH2 amino acid sequence of Seq ID No:133 (IMGT) or Seq ID No:136 (Kabat), and the CDRH3 amino acid sequence of Seq ID No:134 (IMGT) or Seq ID No:137 (Kabat). The heavy chain nucleic acid sequence of the V_{H} domain is Seq ID No:139. 413D08 has a light chain variable region (V_{L}) amino acid sequence of Seq ID No:148, comprising the CDRL1 amino acid sequence of Seq ID No:142 (IMGT) or Seq ID No:145 (Kabat), the CDRL2 amino acid sequence of Seq ID No:143 (IMGT) or Seq ID No:146 (Kabat), and the CDRL3 amino acid sequence of Seq ID No:144 (IMGT) or Seq ID No:147 (Kabat). The light chain nucleic acid sequence of the V_{L} domain is Seq ID No:149. The V_{H} domain may be combined with any of the heavy chain constant region sequences described herein, e.g. Seq ID No:193, Seq ID No:195, Seq ID No:197, Seq ID No:199, Seq ID No:201, Seq ID No:203, Seq ID No:205, Seq ID No:340, Seq ID No:524, Seq ID No:526, Seq ID No:528, Seq ID No:530, Seq ID No:532 or Seq ID No:534. The V_{L} domain may be combined with any of the light chain constant region sequences described herein, e.g. Seq ID Nos:207, 209, 211, 213, 215, 217, 219, 221, 223, 225, 227, 229, 231, 233, 235, 237, 536 and 538. A full length heavy chain amino acid sequence is Seq ID No: 140 (heavy chain nucleic acid sequence Seq ID No:141). A full length light chain amino acid sequence is Seq ID No:150 (light chain nucleic acid sequence Seq ID No:151).

[0301] 413G05 has a heavy chain variable (V_{H}) region amino acid sequence of Seq ID No:244, comprising the CDRH1 amino acid sequence of Seq ID No:238 (IMGT) or Seq ID No:241 (Kabat), the CDRH2 amino acid sequence of Seq ID No:239 (IMGT) or Seq ID No:242 (Kabat), and the CDRH3 amino acid sequence of Seq ID No:240 (IMGT) or Seq ID No:243 (Kabat). The heavy chain nucleic acid sequence of the V_{H} domain is Seq ID No:245. 413G05 has a light chain variable region (V_{L}) amino acid sequence of Seq ID No:254, comprising the CDRL1 amino acid sequence of Seq ID No:248 (IMGT) or Seq ID No:251 (Kabat), the CDRL2 amino acid sequence of Seq ID No:249 (IMGT) or Seq ID No:252 (Kabat), and the CDRL3 amino acid sequence of Seq ID No:250 (IMGT) or Seq ID No:253 (Kabat). The light chain nucleic acid sequence of the V_{L} domain is Seq ID No:255. The V_{H} domain may be combined with any of the heavy chain constant region sequences described herein, e.g. Seq ID No:193, Seq ID No:195, Seq ID No:197, Seq ID No:199, Seq ID No:201, Seq ID No:203, Seq ID No:205, Seq ID No:340, Seq ID No:524, Seq ID No:526, Seq ID No:528, Seq ID No:530, Seq ID No:532 or Seq ID No:534. The V_{L} domain may be combined with any of the light chain constant region sequences described herein, e.g. Seq ID Nos:207, 209, 211, 213, 215, 217, 219, 221, 223, 225, 227, 229, 231, 233, 235, 237, 536 and 538. A full length heavy chain amino acid sequence is Seq ID No:246 (heavy chain nucleic acid sequence Seq ID No:247). A full length light chain amino acid sequence is Seq ID No:256 (light chain nucleic acid sequence Seq ID No:257).

[0302] 413F09 has a heavy chain variable (V_{H}) region amino acid sequence of Seq ID No:264, comprising the CDRH1 amino acid sequence of Seq ID No:258 (IMGT) or Seq ID No:261 (Kabat), the CDRH2 amino acid sequence of Seq ID No:259 (IMGT) or Seq ID No:262 (Kabat), and the CDRH3 amino acid sequence of Seq ID No:260 (IMGT) or Seq ID No:263 (Kabat). The heavy chain nucleic acid sequence of the V_{H} domain is Seq ID No:265. 413F09 has a light chain variable region (V_{L}) amino acid sequence of Seq ID No:274, comprising the CDRL1 amino acid sequence of Seq ID No:268 (IMGT) or Seq ID No:271 (Kabat), the CDRL2 amino acid sequence of Seq ID No:269 (IMGT) or Seq ID No:272 (Kabat), and the CDRL3 amino acid sequence of Seq ID No:270 (IMGT) or Seq ID No:273 (Kabat). The light chain nucleic acid sequence of the V_{L} domain is Seq ID No:275. The V_{H} domain may be combined with any of the heavy chain constant region sequences described herein, e.g. Seq ID No:193, Seq ID No:195, Seq ID No:197, Seq ID No:199, Seq ID No:201, Seq ID No:203, Seq ID No:205, Seq ID No:340, Seq ID No:524, Seq ID No:526, Seq ID No:528, Seq ID No:530, Seq ID No:532 or Seq ID No:534. The V_{L} domain may be combined with any of the light chain constant region sequences described herein, e.g. Seq ID Nos:207, 209, 211, 213, 215, 217, 219, 221, 223, 225, 227, 229, 231, 233, 235, 237, 536 and 538. A full length heavy chain amino acid sequence is Seq ID No:266 (heavy chain nucleic acid sequence Seq ID No:267). A full length light chain amino acid sequence is Seq ID No:276 (light chain nucleic acid sequence Seq ID No:277).

[0303] 414B06 has a heavy chain variable (V_{H}) region amino acid sequence of Seq ID No:284, comprising the CDRH1 amino acid sequence of Seq ID No:278 (IMGT) or Seq ID No:281 (Kabat), the CDRH2 amino acid sequence of Seq ID No:279 (IMGT) or Seq ID No:282 (Kabat), and the CDRH3 amino acid sequence of Seq ID No:280 (IMGT) or Seq ID No:283 (Kabat). The heavy chain nucleic acid sequence of the V_{H} domain is Seq ID No:285. 414B06 has a light chain variable region (V_{L}) amino acid sequence of Seq ID No:294, comprising the CDRL1 amino acid sequence of Seq ID No:288 (IMGT) or Seq ID No:291(Kabat), the CDRL2 amino acid sequence of Seq ID No:289 (IMGT) or Seq ID No:292 (Kabat), and the CDRL3 amino acid sequence of Seq ID No:290 (IMGT) or Seq ID No:293 (Kabat). The light chain nucleic acid sequence of the V_{L} domain is Seq ID No:295. The V_{H} domain may be combined with any of the heavy chain constant region sequences described herein, e.g. Seq ID No:193, Seq ID No:195, Seq ID No:197, Seq ID No:199, Seq ID No:201, Seq ID No:203, Seq ID No:205, Seq ID No:340, Seq ID No:524, Seq ID No:526, Seq ID No:528, Seq ID No:530, Seq ID No:532 or Seq ID No:534. The V_{L} domain may be combined with any of the light chain constant region sequences described herein, e.g. Seq ID Nos:207, 209, 211, 213, 215, 217, 219, 221, 223, 225, 227, 229, 231, 233, 235, 237, 536 and 538. A full length heavy chain amino acid sequence is Seq ID No:286 (heavy chain nucleic acid sequence Seq ID No:287). A full length light chain amino acid sequence is Seq ID No:296 (light chain nucleic acid sequence Seq ID No:297).

[0304] 416E01 has a heavy chain variable region (V_{H}) amino acid sequence of Seq ID No:349, comprising the CDRH1 amino acid sequence of Seq ID No:343 (IMGT) or Seq ID No:346 (Kabat), the CDRH2 amino acid sequence of Seq ID No:344 (IMGT) or Seq ID No:347 (Kabat), and the CDRH3 amino acid sequence of Seq ID No:345 (IMGT) or Seq ID No:348 (Kabat). The heavy chain nucleic acid sequence of the V_{H} domain is Seq ID No:350. 416E01 has a light chain variable region (V_{L}) amino acid sequence of Seq ID No:359, comprising the CDRL1 amino acid sequence of Seq ID No:353 (IMGT) or Seq ID No:356 (Kabat), the CDRL2 amino acid sequence of Seq ID No:354 (IMGT) or Seq ID No:357 (Kabat), and the CDRL3 amino acid sequence of Seq ID No:355 (IMGT) or Seq ID No:358 (Kabat). The light chain nucleic acid sequence of the V_{L} domain is Seq ID No:360. The V_{H} domain may be combined with any of the heavy chain constant region sequences described herein, e.g. Seq ID No:193, Seq ID No:195, Seq ID No:197, Seq ID No:199, Seq ID No:201, Seq ID No:203, Seq ID No:205, Seq ID No:340, Seq ID No:524, Seq ID No:526, Seq ID No:528, Seq ID No:530, Seq ID No:532 or Seq ID No:534. The V_{L} domain may be combined with any of the light chain constant region sequences described herein, e.g. Seq ID Nos:207, 209, 211, 213, 215, 217, 219, 221, 223, 225, 227, 229, 231, 233, 235, 237, 536 and 538. A full length heavy chain amino acid sequence is Seq ID No:351 (heavy chain nucleic acid sequence Seq ID No:352). A full length light chain amino acid sequence is Seq ID No:361 (light chain nucleic acid sequence Seq ID No:362).

[0305] The antibodies of the invention are described with respect to the following concepts, aspects, sentences, arrangements and embodiments. Unless otherwise stated, all concepts, embodiments, sentences, arrangements and aspects are to be read as being able to be combined with any other concept, aspect, sentence, arrangement or embodiment, unless such combination would not make technical sense or is explicitly stated otherwise.

Concept 1. An antibody or a fragment thereof, which specifically binds to hPD-L1 as defined by Seq ID No:1, and competes for binding to said hPD-L1 with the antibody 1D05, wherein the antibody or fragment comprises a V_{H} domain which comprises a CDRH3 comprising the motif X₁GSGX₂YGX₃X₄FD, wherein X₁, X₂ and X₃ are independently any amino acid, and X₄ is either present or absent, and if present, may be any amino acid.

[0306] In these concepts, antibodies or fragments may include or may not include bispecific antibodies. In one embodiment, in these concepts, antibodies or fragments includes bispecific antibodies. In one embodiment, a bispecific antibody does not include a FIT-Ig format. In one embodiment, a bispecific antibody does not include a mAb² format. In one embodiment, a bispecific antibody does not include either a FIT-Ig format or a mAb² format. In one embodiment, the antibody or fragment in these concepts includes a bispecific antibody, but does not include a bispecific antibody having a FIT-Ig format. In one embodiment, the antibody or fragment in these concepts includes a bispecific antibody, but does not include a bispecific antibody having a mAb² format. In one embodiment, the antibody or fragment in these concepts includes a bispecific antibody, but does not include a bispecific antibody having a FIT-Ig format or a mAb² format. In another embodiment, in these concepts, antibodies or fragments include dual binding antibodies.

[0307] Preferably, an antibody or a fragment thereof that specifically binds to a hPD-L1 antigen does not cross-react with other antigens (but may optionally cross-react with PD-L1 of a different species, e.g., rhesus, cynomolgus, or murine). An antibody or a fragment thereof that specifically binds to a hPD-L1 antigen can be identified, for example, by immunoassays, BIAcore™, or other techniques known to those of skill in the art. An antibody or a fragment thereof binds specifically to a hPD-L1 antigen when it binds to a hPD-L1 antigen with higher affinity than to any cross-reactive antigen as determined using experimental techniques, such as radioimmunoassays (RIA) and enzyme-linked immunosorbent assays (ELISAs). Typically, a specific or selective reaction will be at least twice background signal or noise and more typically more than 10 times background. See, e.g. Paul, ed., 1989, Fundamental Immunology Second Edition, Raven Press, New York at pages 332-336 for a discussion regarding antibody specificity.

[0308] In one embodiment, the antibody or fragment is a human antibody. In one embodiment, the antibody or fragment is a human antibody or fragment. In one embodiment, the antibody or fragment is a fully human antibody or fragment. In one embodiment, the antibody or fragment is a fully human monoclonal antibody or fragment.

[0309] There is also provided concept 1a: An antibody or a fragment thereof, that specifically binds to hPD-L1 as defined by Seq ID No:1, and competes for binding to said hPD-L1 with the antibody 411B08, wherein the antibody or fragment comprises a V_{H} domain which comprises a CDRH3 comprising the motif ARX₁RX₂X₃SDX₄X₅D, wherein X₁, X₂, X₃, X₄ and X₅ are independently any amino acid.

[0310] There is also provided concept 1b: An antibody or a fragment thereof, that specifically binds to hPD-L1 as defined by Seq ID No:1, and competes for binding to said hPD-L1 with the antibody 411B08, wherein the antibody or fragment comprises a V_{H} domain which comprises a CDRH3 comprising the motif X₁RDGSGSY, wherein X₁ is any amino acid.

[0311] As provided in the concepts or aspects herein, an anti-PD-L1 antibody or immunocytokine may bind to PD-L1, e.g. human PD-L1 with a K_{D} of less than 50 nM, less than 40 nM, less than 30 nM as determined by surface plasmon resonance. Another embodiment, anti-PD-L1 antibody or immunocytokine may bind to PD-L1, e.g. human PD-L1 with a K_{D} of less than 20 nM, less than 15 nM, less than 10 nM as determined by surface plasmon resonance. anti-PD-L1 antibody or immunocytokine may bind to PD-L1, e.g. human PD-L1 with a K_{D} of less than 8 nM, less than 5 nM, less than 4 nM, less than 3 nM, less than 2 nM or less than 1 nM as determined by surface plasmon resonance. The K_{D} may be 0.9 nM or less, 0.8 nM or less, 0.7 nM or less, 0.6 nM or less, 0.5 nM or less, 0.4 nM or less, 0.3 nM or less, 0.2 nM or less, or 0.1 nM or less.

[0312] In another embodiment, the K_{D} is within a range of 0.01 to 1 nM, or a range of 0.05 to 2 nM, or a range of 0.05 to 1 nM. The K_{D} may be with regard to hPD-L1, cynoPD-L1 and/or mouse PD-L1.

[0313] In another embodiment, the anti-PD-L1 antibodies described herein have a K_{ON} rate (e.g. as measured by SPR, e.g. at 25° C. or at 37° C.) of approximately 0.5 to 10 μM, for example approximately 1 to 8 μM or approximately 1 to 7 μM. In another embodiment, the K_{ON} rate is approximately 1 to 5 μM, e.g. approximately 1 μM, approximately 1.5 μM, approximately 2 μM, approximately 2.5 μM or approximately 3 μM. In another embodiment, the K_{ON} rate is approximately 3.5 μM, approximately 4 μM, approximately 4.5 μM, approximately 5 μM or approximately 5.5 μM.

[0314] In another embodiment, the anti-PD-L1 antibodies described herein have a K_{OFF} rate (e.g. as measured by SPR, e.g. at 25° C. or at 37° C.) of approximately 0.01 to 100 mM, for example approximately 0.1 to 50 mM or approximately 0.5 to 50 mM. In another embodiment, the K_{OFF} rate is approximately 0.5 to 10 mM, or approximately 0.5 to 10 mM, e.g. approximately 1 mM, approximately 2 mM, approximately 3 mM, approximately 4 mM or approximately 5 mM. In another embodiment, the K_{OFF} rate is approximately 0.6 mM, approximately 0.7 mM, approximately 0.8 mM or approximately 0.9 mM.

[0315] In another embodiment, the anti-PD-L1 antibodies (and immunocytokines) described in the concepts and aspects herein provide improved transient expression levels over other anti-PD-L1 antibodies and immunocytokines. Thus, in one embodiment, the anti-PD-L1 antibody (or immunocytokine) is expressed in a HEK293 cell, e.g. a HEK293T cell, at an expression level of approximately 100 μg/mL, or in a range of approximately 100 to 350 μg/mL. In another embodiment, the expression level is above approximately 350 μg/mL.

[0316] In another embodiment, the anti-PD-L1 antibody (or immunocytokine) is expressed in a CHO cell, e.g. an Expi-CHO cell, at an expression level of approximately 100 μg/mL, or in a range of approximately 100 to 350 μg/mL. In another embodiment, the expression level is above approximately 350 μg/mL.

[0317] In another embodiment, the anti-PD-L1 antibody (or immunocytokine) is expressed in a CHO cell, e.g. an Expi-CHO cell or a CHO-E7 EBNA cell, at an expression level of approximately 100 μg/mL, or in a range of approximately 100 to 350 μg/mL. In another embodiment, the expression level is above approximately 350 μg/mL. The antibody described herein as 1D05, formatted as a human IgG1 (Seq ID No:340, at 2 L volume in CHO-E7 EBNA cells has an expression level of approximately 115 μg/mL. The antibody described herein as 416E01, formatted as a human IgG1 (Seq ID No:340), at 2 L volume in CHO-E7 EBNA cells has an expression level of approximately 160 μg/mL. The antibody described herein as 1414B06, formatted as a human IgG1 (Seq ID No:340), at 2 L volume in CHO-E7 EBNA cells has an expression level of approximately 783 μg/mL. The antibody described herein as 413G05, formatted as a human IgG1 (Seq ID No:340), at 2 L volume in CHO-E7 EBNA cells has an expression level of approximately 383 μg/mL.

[0318] In any of these expression systems, the expression is carried out of a scale of between approximately 0.5 mL and 3 mL, for example between approximately 0.5 mL and 2 mL. In any of these expression systems, the anti-PD-L1 antibody (or immunocytokine) may be expressed from a pTT5 vector. In any of these expression systems, the anti-PD-L1 antibody (or immunocytokine) may be expressed in conjunction with a lipid transfection reagent, and may optionally be expressed in a CHO cell, e.g. an Expi-CHO cell. In any of these expression systems, the anti-PD-L1 antibody (or immunocytokine) may be expressed in conjunction with a PEI transfection reagent, and may optionally be expressed in a CHO cell, e.g. an CHO-E7 EBNA cell. In any of these expression systems, the anti-PD-L1 antibody (or immunocytokine) may be expressed in conjunction with a helper plasmid (e.g. an AKT helper plasmid), and may optionally be expressed in a CHO cell, e.g. an CHO-E7 EBNA cell.

[0319] In any of these expression systems, the expression level is between approximately 100 μg/mL and approximately 1500 μg/mL, for example between approximately 100 μg/mL and approximately 1000 μg/mL, or between approximately 200 μg/mL and approximately 1000 μg/mL, or between approximately 350 μg/mL and approximately 1000 μg/mL. In any of these expression systems, the lower limit of expression may be approximately 100 μg/mL, approximately 200 μg/mL, approximately 300 μg/mL, or approximately 400 μg/mL. In another embodiment, the lower limit of expression may be approximately 500 μg/mL, approximately 600 μg/mL, approximately 700 μg/mL, or approximately 800 μg/mL. In any of these expression systems, the upper limit of expression may be approximately 2000 μg/mL, approximately 1800 μg/mL, approximately 1600 μg/mL, or approximately 1500 μg/mL. In another embodiment, the upper limit of expression may be approximately 1250 μg/mL, approximately 1000 μg/mL, approximately 900 μg/mL, or approximately 800 μg/mL.

[0320] In another embodiment, the expression system is a Lonza expression system, e.g. Lonza X-Ceed® system. In the Lonza expression system, the expression may be carried out at a scale of approximately 30 mL to 2 L, for example 50 mL to 1 L, or 1 L tp 2 L. In the Lonza expression system, the anti-PD-L1 antibody (or immunocytokine) may be expressed in conjunction with electroporation, and optionally without any helper plasmids. In the Lonza expression system, the anti-PD-L1 antibody (or immunocytokine) may be expressed at a level of approximately 1 g/L, or approximately 900 mg/L, or approximately 800 mg/L, or approximately 700 mg/L. In another embodiment, In the Lonza expression system, the anti-PD-L1 antibody (or immunocytokine) may be expressed at a level of approximately 600 mg/L or approximately 500 mg/L or approximately 400 mg/L. In the Lonza expression system, the anti-PD-L1 antibody (or immunocytokine) may be expressed at a level of between approximately 400 mg/L and approximately 2 g/L, for example between approximately 500 mg/L and approximately 1.5 g/L, or between approximately 500 mg/L and approximately 1 g/L. In another embodiment, the expression level is above 1 g/L. In another embodiment, the anti-PD-L1 antibodies described in the concepts provide improved half-life over other anti-PD-L1 antibodies as further described in Aspect 1 hereinbelow.

Concept 2. The antibody or fragment according to concept 1, wherein X₁ is a hydroxyl-containing amino acid, optionally T.

[0321] In one embodiment, the hydroxyl-containing amino acid is Serine. In one embodiment, the hydroxyl-containing amino acid is Cysteine. In one embodiment, the hydroxyl-containing amino acid is Threonine. In one embodiment, the hydroxyl-containing amino acid is Methionine. In one embodiment, the hydroxyl-containing amino acid is Serine or Cysteine. In one embodiment, the hydroxyl-containing amino acid is Serine or Threonine. In one embodiment, the hydroxyl-containing amino acid is Serine or Methionine. In one embodiment, the hydroxyl-containing amino acid is Cysteine or Threonine. In one embodiment, the hydroxyl-containing amino acid is Cysteine or Methionine. In one embodiment, the hydroxyl-containing amino acid is Threonine or Methionine.

[0322] In one embodiment, the hydroxyl-containing amino acid is selected from serine, cysteine, threonine and methionine.

[0323] Concept 2a. The antibody or fragment according to concept 1a, wherein X₁ is an aliphatic amino acid or an amide amino acid.

[0324] In one embodiment, X₁ is selected from Asparagine (N) and valine (V). In one embodiment, X₁ is valine. In one embodiment, X₁ is asparagine.

[0325] Concept 2b. The antibody or fragment according to concept 1b, wherein X₁ is an aliphatic amino acid.

[0326] In one embodiment, X₁ is selected from alanine (A) or valine (V). In one embodiment, X₁ is valine. In one embodiment, X₁ is alanine.

Concept 3. The antibody or fragment according to concept 1 or concept 2, wherein X₂ is a basic amino acid, optionally K.

[0327] In one embodiment, the hydroxyl-containing amino acid is Histidine. In one embodiment, the hydroxyl-containing amino acid is Lysine. In one embodiment, the hydroxyl-containing amino acid is Arginine. In one embodiment, the hydroxyl-containing amino acid is Histidine or Lysine. In one embodiment, the hydroxyl-containing amino acid is Histidine or Arginine. In one embodiment, the hydroxyl-containing amino acid is Lysine or Arginine.

[0328] In one embodiment, the hydroxyl-containing amino acid is selected from Histidine, Lysine and Arginine.

[0329] Concept 3a. The antibody or fragment according to concept 1a or concept 2a, wherein X₂ is an aliphatic amino acid or an amide amino acid.

[0330] In one embodiment, X₂ is selected from leucine (L), isoleucine (I), Valine (V), Asparagine (N) and glutamine (Q). In one embodiment, X₂ is selected from leucine (L), isoleucine (I) and Valine (V). In one embodiment, X₂ is selected from Asparagine (N) and glutamine (Q) In one embodiment, X₂ is selected from leucine (L) and glutamine (Q). In one embodiment, X₂ is leucine (L). In one embodiment, X₂ is glutamine (Q).

Concept 4. The antibody or fragment according to any one of concepts 1 to 3, wherein X₂ is a hydroxyl-containing amino acid, optionally S or T.

[0331] In one embodiment, the hydroxyl-containing amino acid is Serine. In one embodiment, the hydroxyl-containing amino acid is Cysteine. In one embodiment, the hydroxyl-containing amino acid is Threonine. In one embodiment, the hydroxyl-containing amino acid is Methionine. In one embodiment, the hydroxyl-containing amino acid is Serine or Cysteine. In one embodiment, the hydroxyl-containing amino acid is Serine or Threonine. In one embodiment, the hydroxyl-containing amino acid is Serine or Methionine. In one embodiment, the hydroxyl-containing amino acid is Cysteine or Threonine. In one embodiment, the hydroxyl-containing amino acid is Cysteine or Methionine. In one embodiment, the hydroxyl-containing amino acid is Threonine or Methionine.

[0332] In one embodiment, the hydroxyl-containing amino acid is selected from serine, cysteine, threonine and methionine.

[0333] Concept 4a. The antibody or fragment according to any one of concepts 1a, 2a or 3a, wherein X₃ is an aromatic amino acid.

[0334] In one embodiment, X₃ is selected from Phenylalanine (F), Tyrosine (Y) and Tryptophan (W). In one embodiment, X₃ is selected from Tyrosine (Y) and Tryptophan (W). In one embodiment, X₃ is Tyrosine (Y). In one embodiment, X₃ is Tryptophan (W).

Concept 5. The antibody or fragment according to any one of concepts 1 to 4, wherein X₃ is an aromatic amino acid, optionally W.

[0335] In one embodiment, the hydroxyl-containing amino acid is Phenylalanine. In one embodiment, the hydroxyl-containing amino acid is Tyrosine. In one embodiment, the hydroxyl-containing amino acid is Tryptophan. In one embodiment, the hydroxyl-containing amino acid is Phenylalanine or Tyrosine. In one embodiment, the hydroxyl-containing amino acid is Phenylalanine or Tryptophan. In one embodiment, the hydroxyl-containing amino acid is Tyrosine or Tryptophan.

[0336] In one embodiment, the hydroxyl-containing amino acid is selected from Phenylalanine, Tyrosine and Tryptophan.

[0337] Concept 5a. The antibody or fragment according to any one of concepts 1a, 2a, 3a or 4a wherein X₄ is an aromatic amino acid.

[0338] In one embodiment, X₄ is selected from Phenylalanine (F), Tyrosine (Y) and Tryptophan (W).

[0339] In one embodiment, X₄ is selected from Tyrosine (Y) and Phenylalanine (F). In one embodiment, X₄ is Tyrosine (Y). In one embodiment, X₄ is Phenylalanine (F).

Concept 6. The antibody or fragment according to any one of concepts 1 to 5, wherein X₄ is absent.

[0340] Concept 6a. The antibody or fragment according to any one of concepts 1a, 2a, 3a, 4a or 5a wherein X₅ is an aliphatic amino acid or an hydroxyl-containing amino acid.

[0341] In one embodiment, X₅ is selected from leucine (L), isoleucine (I), Valine (V), Serine (S), Cysteine (C) and Threonine (T). In one embodiment, X₅ is selected from leucine (L), isoleucine (I) and Valine (V). In one embodiment, X₅ is selected from Serine (S), Cysteine (C) and Threonine (T). In one embodiment, X₅ is selected from leucine (L) and Serine (S). In one embodiment, X₅ is Serine (S). In one embodiment, X₅ is leucine (L).

Concept 7. The antibody or fragment according to any one of concepts 1 to 5, wherein X₄ is present.

[0342] Concept 8. The antibody or fragment according to concept 7, wherein X₄ is an aliphatic amino acid, optionally G.

In one embodiment, the hydroxyl-containing amino acid is selected from Glycine, Alanine, Valine, Leucine and Isoleucine.

[0343] In one embodiment, the hydroxyl-containing amino acid is selected from Glycine and Alanine. In one embodiment, the hydroxyl-containing amino acid is selected from Glycine and Valine. In one embodiment, the hydroxyl-containing amino acid is selected from Glycine and Leucine. In one embodiment, the hydroxyl-containing amino acid is selected from Glycine and Isoleucine. In one embodiment, the hydroxyl-containing amino acid is selected from Alanine and Valine. In one embodiment, the hydroxyl-containing amino acid is selected from Alanine and Leucine. In one embodiment, the hydroxyl-containing amino acid is selected from Alanine and Isoleucine. In one embodiment, the hydroxyl-containing amino acid is selected from Valine and Leucine. In one embodiment, the hydroxyl-containing amino acid is selected from Valine and Isoleucine. In one embodiment, the hydroxyl-containing amino acid is selected from, Leucine and Isoleucine.

[0344] In one embodiment, the hydroxyl-containing amino acid selected from three of each of Glycine, Alanine, Valine, Leucine and Isoleucine. In one embodiment, the hydroxyl-containing amino acid selected from four of each of Glycine, Alanine, Valine, Leucine and Isoleucine.

Concept 9. An antibody or a fragment thereof, optionally according to any one of concepts 1 to 8, which specifically binds to hPD-L1, and competes for binding to said hPD-L1 with the antibody 1D05, wherein the antibody or fragment comprises a V_{H} domain which comprises the CDRH3 sequence of SEQ ID NO:29 or 32, or the CDRH3 sequence of SEQ ID NO:29 or 32 comprising 6 or fewer amino acid substitutions.

[0345] Concept 9a: An antibody or a fragment thereof, optionally according to any one of concepts 1 to 8, which specifically binds to hPD-L1, and competes for binding to said hPD-L1 with the antibody 84G09, wherein the antibody or fragment comprises a V_{H} domain which comprises the CDRH3 sequence of SEQ ID NO:9 or 12, or the CDRH3 sequence of SEQ ID NO:9 or 12 comprising 6 or fewer amino acid substitutions.

[0346] Concept 9b: An antibody or a fragment thereof, optionally according to any one of concepts 1 to 8, which specifically binds to hPD-L1, and competes for binding to said hPD-L1 with the antibody 411B08, wherein the antibody or fragment comprises a V_{H} domain which comprises the CDRH3 sequence of SEQ ID NO:54 or 57, or the CDRH3 sequence of SEQ ID NO:54 or 57 comprising 6 or fewer amino acid substitutions.

[0347] Concept 9c: An antibody or a fragment thereof, optionally according to any one of concepts 1 to 8, which specifically binds to hPD-L1, and competes for binding to said hPD-L1 with the antibody 411C04, wherein the antibody or fragment comprises a V_{H} domain which comprises the CDRH3 sequence of SEQ ID No:74 or 77, or the CDRH3 sequence of SEQ ID NO:74 or 77 comprising 6 or fewer amino acid substitutions.

[0348] Concept 9d: An antibody or a fragment thereof, optionally according to any one of concepts 1 to 8, which specifically binds to hPD-L1, and competes for binding to said hPD-L1 with the antibody 411D07, wherein the antibody or fragment comprises a V_{H} domain which comprises the CDRH3 sequence of SEQ ID NO:94 or 97, or the CDRH3 sequence of SEQ ID NO:94 or 97 comprising 3 or fewer amino acid substitutions.

[0349] Concept 9e: An antibody or a fragment thereof, optionally according to any one of concepts 1 to 8, which specifically binds to hPD-L1, and competes for binding to said hPD-L1 with the antibody 385F01, wherein the antibody or fragment comprises a V_{H} domain which comprises the CDRH3 sequence of SEQ ID NO:114 or 117, or the CDRH3 sequence of SEQ ID NO:114 or 117 comprising 6 or fewer amino acid substitutions.

[0350] Concept 9f: An antibody or a fragment thereof, optionally according to any one of concepts 1 to 8, which specifically binds to hPD-L1, and competes for binding to said hPD-L1 with the antibody 386H03, wherein the antibody or fragment comprises a V_{H} domain which comprises the CDRH3 sequence of SEQ ID NO:144 or 147, or the CDRH3 sequence of SEQ ID NO:144 or 147 comprising 3 or fewer amino acid substitutions.

[0351] Concept 9g: An antibody or a fragment thereof, optionally according to any one of concepts 1 to 8, which specifically binds to hPD-L1, and competes for binding to said hPD-L1 with the antibody 389A03, wherein the antibody or fragment comprises a V_{H} domain which comprises the CDRH3 sequence of SEQ ID NO:174 or 177, or the CDRH3 sequence of SEQ ID NO:174 or 177 comprising 6 or fewer amino acid substitutions.

[0352] Concept 9h: An antibody or a fragment thereof, optionally according to any one of concepts 1 to 8, which specifically binds to hPD-L1, and competes for binding to said hPD-L1 with the antibody 413D08, wherein the antibody or fragment comprises a V_{H} domain which comprises the CDRH3 sequence of SEQ ID NO:134 or 137, or the CDRH3 sequence of SEQ ID NO:134 or 137 comprising 5 or fewer amino acid substitutions.

[0353] Concept 9i: An antibody or a fragment thereof, optionally according to any one of concepts 1 to 8, which specifically binds to hPD-L1, and competes for binding to said hPD-L1 with the antibody 413G05, wherein the antibody or fragment comprises a V_{H} domain which comprises the CDRH3 sequence of SEQ ID NO:240 or 243, or the CDRH3 sequence of SEQ ID NO:240 or 243 comprising 6 or fewer amino acid substitutions.

[0354] Concept 9j: An antibody or a fragment thereof, optionally according to any one of concepts 1 to 8, which specifically binds to hPD-L1, and competes for binding to said hPD-L1 with the antibody 413F09, wherein the antibody or fragment comprises a V_{H} domain which comprises the CDRH3 sequence of SEQ ID NO:260 or 263, or the CDRH3 sequence of SEQ ID NO:260 or 263 comprising 6 or fewer amino acid substitutions.

[0355] Concept 9k: An antibody or a fragment thereof, optionally according to any one of concepts 1 to 8, which specifically binds to hPD-L1, and competes for binding to said hPD-L1 with the antibody 414B06, wherein the antibody or fragment comprises a V_{H} domain which comprises the CDRH3 sequence of SEQ ID NO:280 or 283, or the CDRH3 sequence of SEQ ID NO:280 or 283 comprising 6 or fewer amino acid substitutions.

[0356] Concept 9l: An antibody or a fragment thereof, optionally according to any one of concepts 1 to 8, which specifically binds to hPD-L1, and competes for binding to said hPD-L1 with the antibody 416E01, wherein the antibody or fragment comprises a V_{H} domain which comprises the CDRH3 sequence of SEQ ID No:345 or 348, or the CDRH3 sequence of SEQ ID No:345 or 348 comprising 6 or fewer amino acid substitutions.

[0357] In all of concepts 9, 9a to l, 17, 17a to l, 18, 18a to l, 19, 19a to l, 22, 22a to l, 23, 23a to l, 24 and 24a to l, in one embodiment, the CDR comprises one amino acid substitution, which may be a conservative amino acid substitution. In all of concepts 9, 9a to l, 17, 17a to l, 18, 18a to l, 19, 19a to l, 22, 22a to l, 23, 23a, 24 and 24a to l, in one embodiment, the CDR comprises two amino acid substitutions, which may be conservative amino acid substitutions. In all of concepts 9, 9a to l, 17, 17a to l, 18, 18a to l, 19, 19a to l, 22, 22a, 22b, 22d, 22f, 22g, 24 and 24a to l, in one embodiment, the CDR comprises three amino acid substitutions, which may be conservative amino acid substitutions. In all of concepts 9, 9a to c, 9e, 9g to l, 17, 17a to c, 17e, 17g to l, 19, 19a, 22, 22d, 22f, 22g, 24 and 24a to l, in one embodiment, the CDR comprises four amino acid substitutions, which may be conservative amino acid substitutions. In all of concepts 9, 9a to c, 9e, 9g to l, 17, 17a to c, 17e, 17g to l, 22d, 22f and 22g, in one embodiment, the CDR comprises five amino acid substitutions, which may be conservative amino acid substitutions. In all of concepts 9, 9a to c, 9e, 9g, 9i to l, 17, 17a to c, 17e, 17g and 17i to l, in one embodiment, the CDR comprises six amino acid substitutions, which may be conservative amino acid substitutions.

[0358] Amino acid substitutions include alterations in which an amino acid is replaced with a different naturally-occurring amino acid residue. Such substitutions may be classified as “conservative”, in which case an amino acid residue contained in a polypeptide is replaced with another naturally occurring amino acid of similar character either in relation to polarity, side chain functionality or size. Such conservative substitutions are well known in the art. Substitutions encompassed by the present invention may also be “non-conservative”, in which an amino acid residue which is present in a peptide is substituted with an amino acid having different properties, such as naturally-occurring amino acid from a different group (e.g. substituting a charged or hydrophobic amino; acid with alanine), or alternatively, in which a naturally-occurring amino acid is substituted with a non-conventional amino acid.

[0359] In one embodiment, the conservative amino acid substitutions are as described herein. For example, the substitution may be of Y with F, T with S or K, P with A, E with D or Q, N with D or G, R with K, G with N or A, T with S or K, D with N or E, I with L or V, F with Y, S with T or A, R with K, G with N or A, K with R, A with S, K or P. In another embodiment, the conservative amino acid substitutions may be wherein Y is substituted with F, T with A or S, I with L or V, W with Y, M with L, N with D, G with A, T with A or S, D with N, I with L or V, F with Y or L, S with A or T and A with S, G, T or V.

Concept 10. An antibody or fragment which specifically binds to hPD-L1 and comprises a V_{H} domain comprising a CDRH3 of from 12 to 20 amino acids and which is derived from the recombination of a human V_{H} gene segment, a human D gene segment and a human J_{H} gene segment, wherein the human J_{H} gene segment is IGHJ5 (e.g. IGHJ5*02).

[0360] In one embodiment, the CDRH3 is from 14 to 17 amino acids and the human J_{H} gene segment is IGHJ5 (e.g. IGHJ5*02).

[0361] There is also provided as concept 10a an antibody or fragment which specifically binds to hPD-L1 and comprises a V_{H} domain comprising a CDRH3 of from 8 to 16 amino acids and which is derived from the recombination of a human V_{H} gene segment, a human D gene segment and a human J_{H} gene segment, wherein the human J_{H} gene segment is selected from IGHJ4 (e.g. IGHJ4*02), IGHJ5 (e.g. IGHJ5*02) and IGHJ6 (e.g. IGHJ6*02).

[0362] In another embodiment, the human J_{H} gene segment is IGHJ6 (e.g. IGHJ6*02). In another embodiment, the CDRH3 is of from 10 to 17 amino acids and the human J_{H} gene segment is IGHJ6 (e.g. IGHJ6*02).

[0363] In another embodiment, the human J_{H} gene segment is IGHJ4 (e.g. IGHJ4*02). In another embodiment, the CDRH3 is from 7 to 17 amino acids and the human J_{H} gene segment is IGHJ4 (e.g. IGHJ4*02).

[0364] Optionally, the antibody of concept 10 or 10a has any of the features of concepts 1 to 9, including the binding affinities, Kon and Koff rates, expression levels, half-life etc.

Concept 11. The antibody or fragment according to concept 10 or 10a, wherein the human V_{H} gene segment is IGHV3 (e.g. IGHV3-9, such as IGHV3-9*01).

[0365] There is also provided as concept 11a an antibody or fragment according to concept 10 or 10a, wherein the human V_{H} gene segment is selected from IGHV3 (e.g. IGHV3-9, such as IGHV3-9*01 or e.g. IGHV3-7, such as IGHV3-7*01 or e.g. IGHV3-33, such as IGHV3-33*01 or e.g. IGHV3-11, such as IGHV3-11*01 or e.g. IGHV3-23, such as IGHV3-23*04), or IGHV4 (e.g. IGHV4-4, such as IGHV4-4*02 or e.g. IGHV4-39, such as IGHV4-39*01).

[0366] In one embodiment, the human V_{H} gene segment is IGHV3 (e.g. IGHV3-7, such as IGHV3-7*01). In one embodiment, the human V_{H} gene segment is IGHV3 (e.g. IGHV3-33, such as IGHV3-33*01). In one embodiment, the human V_{H} gene segment is IGHV3 (e.g. IGHV3-11, such as IGHV3-11*01). In one embodiment, the human V_{H} gene segment is IGHV3 (e.g. IGHV3-23, such as IGHV3-23*04).

[0367] In one embodiment, the human V_{H} gene segment is IGHV4 (e.g. e.g. IGHV4-4, such as IGHV4-4*02). In one embodiment, the human V_{H} gene segment is IGHV4 (e.g. IGHV4-39, such as IGHV4-39*01).

[0368] There is also provided as concept 11b an antibody or fragment according to concept 10, 10a, 11 or 11a, wherein the human D gene segment is selected from IGHD1 (e.g. IGHD1-20, such as IGHD1-20*01), IGHD3 (e.g. IGHD3-10, such as IGHD3-10*01), IGHD4 (e.g. IGHD4-11, such as IGHD4-11*01), IGHD5 (e.g. IGHD5-7, such as IGHD5-18*01), and IGHD6 (e.g. IGHD6-13, such as IGHD6-13*01).

[0369] In one embodiment, the human D gene segment is IGHD1 (e.g. IGHD1-20, such as IGHD1-20*01). In one embodiment, the human D gene segment is IGHD3 (e.g. IGHD3-10, such as IGHD3-10*01). In one embodiment, the human D gene segment is IGHD4 (e.g. IGHD4-11, such as IGHD4-11*01). In one embodiment, the human D gene segment is IGHD5 (e.g. IGHD5-18, such as IGHD5-19*01). In one embodiment, the human D gene segment is IGHD6 (e.g. IGHD6-13, such as IGHD6-13*01).

[0370] In any of concepts 10, 11 and 11a, the V_{H}, DH and J_{H} gene segments are as described in the combinations for the antibodies in Table 5 hereinbelow. In one embodiment, the antibody heavy chain is derived from a combination of IGHV3 (e.g. IGHV3-7 such as IGHV3-7*01), IGHD4 (e.g. IGHD4-11 such as IGHD4-11*01) and IGHJ4 (e.g. IGHJ4*02). In one embodiment, the antibody heavy chain is derived from a combination of IGHV4 (e.g. IGHV4-4 such as IGHV4-4*02), IGHD3 (e.g. IGHD3-10 such as IGHD3-10*01) and IGHJ4 (e.g. IGHJ4*02). In one embodiment, the antibody heavy chain is derived from a combination of IGHV4 (e.g. IGHV4-39 such as IGHV4-39*01), IGHD6 (e.g. IGHD6-13 such as IGHD6-13*01) and IGHJ1 (e.g. IGHJ1*01). In one embodiment, the antibody heavy chain is derived from a combination of IGHV3 (e.g. IGHV3-33 such as IGHV3-33*01), IGHD5 (e.g. IGHD5-18 such as IGHD5-18*01) and IGHJ6 (e.g. IGHJ6*02). In one embodiment, the antibody heavy chain is derived from a combination of IGHV3 (e.g. IGHV3-11 such as IGHV3-11*01), IGHD1 (e.g. IGHD1-20 such as IGHD1-20*01) and IGHJ6 (e.g. IGHJ6*02). In one embodiment, the antibody heavy chain is derived from a combination of IGHV3 (e.g. IGHV3-23 such as IGHV3-23*04), IGHD5 (e.g. IGHD5-18 such as IGHD5-18*01) and IGHJ4 (e.g. IGHJ4*02). In one embodiment, the antibody heavy chain is derived from a combination of IGHV3 (e.g. IGHV3-7 such as IGHV3-7*01), IGHD5 (e.g. IGHD5-24 such as IGHD5-24*01) and IGHJ4 (e.g. IGHJ4*02). In one embodiment, the antibody heavy chain is derived from a combination of IGHV3 (e.g. IGHV3-23 such as IGHV3-23*04), IGHD6 (e.g. IGHD6-13 such as IGHD6-13*01) and IGHJ4 (e.g. IGHJ4*02).

Concept 12. The antibody or fragment according to concept 10, 10a, 11, 11a or 11b, wherein the antibody or fragment comprises a V_{L} domain which is derived from the recombination of a human Vκ gene segment, and a human Jκ gene segment, wherein the human Vκ gene segment is IGKV1D (e.g. IGKV1D-39, such as IGKV1D-39*01).

[0371] There is also provided as concept 12a an antibody or fragment according to any of concepts 10, 10a, 11, 11a or 11b, wherein the human Vκ gene segment is selected from IGKV1 (e.g. IGKV1-17, such as IGKV1-17*01 or e.g. IGKV1-9, such as IGKV1-9*d01 or e.g. IGKV1D-12, such as IGKV1D-12*02 or e.g. IGKV1D-39, such as IGKV1D-39*01), and IGKV4 (e.g. IGKV4-1, such as IGKV4-1*01).

[0372] In one embodiment, the human Vκ gene segment is IGKV1 (e.g. IGKV1-17, such as IGKV1-17*01). In one embodiment, the human Vκ gene segment is IGKV1 (e.g. IGKV1-9, such as IGKV1-9*d01). In one embodiment, the human Vκ gene segment is IGKV1 (e.g. IGKV1D-12, such as IGKV1D-12*02). In one embodiment, the human Vκ gene segment is IGKV1 (e.g. IGKV1D-39, such as IGKV1D-39*01).

[0373] In one embodiment, the human Vκ gene segment is IGKV1 IGKV4 (e.g. IGKV4-1, such as IGKV4-1*01)

[0374] There is also provided as concept 12b an antibody or fragment according to concept 10, 10a, 11 or 11a, wherein the human Jκ gene segment is selected from IGκJ1. (e.g. IGκJ1*01), IGκJ2 (e.g. IGκJ2*04), IGκJ3 (e.g. IGκJ3*01), IGκJ4 (e.g. IGκJ4*01) or IGκJ5 (e.g. IGκJ5*01).

[0375] In one embodiment, the human Jκ gene segment is IGκJ1 (e.g. IGκJ1*01). In one embodiment, the human Jκ gene segment is IGκJ2 (e.g. IGκJ2*04). In one embodiment, the human Jκ gene segment is IGκJ3 (e.g. IGκJ3*01). In one embodiment, the human Jκ gene segment is IGκJ4 (e.g. IGκJ4*01). In one embodiment, the human Jκ gene segment is IGκJ5 (e.g. IGκJ5*01).

[0376] In any of concepts 12 and 12a, the Vκ and Jκ gene segments are as described in the combinations for the antibodies in Table 5 hereinbelow. In one embodiment, the antibody light chain is derived from a combination of IGKV1D (e.g. IGKV1D-12 such as IGKV1D-12*02) and IGKJ3 (e.g. IGKJ3*01). In one embodiment, the antibody light chain is derived from a combination of IGKV4 (e.g. IGKV4-1 such as IGKV14-1*01) and IGKJ2 (e.g. IGKJ2*04). In one embodiment, the antibody light chain is derived from a combination of IGKV1 (e.g. IGKV1-17 such as IGKV1-17*01) and IGKJ1 (e.g. IGKJ1*01). In one embodiment, the antibody light chain is derived from a combination of IGKV1D (e.g. IGKV1D-12 such as IGKV1D-12*02) and IGKJ4 (e.g. IGKJ4*01). In one embodiment, the antibody light chain is derived from a combination of IGKV1 (e.g. IGKV1-9 such as IGKV1-9*d01) and IGKJ5 (e.g. IGKJ5*01). In one embodiment, the antibody light chain is derived from a combination of IGKV1D (e.g. IGKV1D-12 such as IGKV1D-12*02) and IGKJ5 (e.g. IGKJ5*01).

Concept 13. An antibody or fragment thereof which specifically binds to an epitope that is identical to an epitope to which the antibody 1D05 specifically binds.

[0377] Concept 13a. An antibody or fragment thereof which specifically binds to an epitope that is identical to an epitope to which the antibody 84G09 specifically binds.

[0378] Concept 13b. An antibody or fragment thereof which specifically binds to an epitope that is identical to an epitope to which the antibody 411B08 specifically binds.

[0379] Concept 13c. An antibody or fragment thereof which specifically binds to an epitope that is identical to an epitope to which the antibody 411C04 specifically binds.

[0380] Concept 13d. An antibody or fragment thereof which specifically binds to an epitope that is identical to an epitope to which the antibody 411D07 specifically binds.

[0381] Concept 13e. An antibody or fragment thereof which specifically binds to an epitope that is identical to an epitope to which the antibody 385F01 specifically binds.

[0382] Concept 13f. An antibody or fragment thereof which specifically binds to an epitope that is identical to an epitope to which the antibody 386H03 specifically binds.

[0383] Concept 13g. An antibody or fragment thereof which specifically binds to an epitope that is identical to an epitope to which the antibody 389A03 specifically binds.

[0384] Concept 13h. An antibody or fragment thereof which specifically binds to an epitope that is identical to an epitope to which the antibody 413D08 specifically binds.

[0385] Concept 13i. An antibody or fragment thereof which specifically binds to an epitope that is identical to an epitope to which the antibody 413G05 specifically binds.

[0386] Concept 13j. An antibody or fragment thereof which specifically binds to an epitope that is identical to an epitope to which the antibody 413F09 specifically binds.

[0387] Concept 13k. An antibody or fragment thereof which specifically binds to an epitope that is identical to an epitope to which the antibody 414B06 specifically binds.

[0388] Concept 13l. An antibody or fragment thereof which specifically binds to an epitope that is identical to an epitope to which the antibody 416E01 specifically binds.

[0389] The antibodies described in these concepts have the sequences as described hereinabove.

[0390] In one embodiment, there is provided an antibody which specifically binds to an epitope which is substantially similar to an epitope to which any of the antibodies in concept 13, 13 a to 13l bind.

[0391] Contact amino acid residues involved in the interaction of antibody and antigen may be determined by various known methods to those skilled in the art.

[0392] In one embodiment, sequential replacement of the amino acids of the antigen sequence (using standard molecular biology techniques to mutate the DNA of the coding sequence of the antigen), in this case hPD-L1 with Alanine (a.k.a Alanine scan), or another unrelated amino acid, may provide residues whose mutation would reduce or ablate the ability of the antibody to recognise the antigen in question. Binding may be assessed using standard techniques, such as, but not limited to, SPR, HTRF, ELISA (which are described elsewhere herein). Other substitutions could be made to enhance the disruption of binding such as changing the charge on the side chain of antigen sequence amino acids (e.g. Lysine change to glutamic acid), switching polar and non-polar residues (e.g. Serine change to leucine). The alanine scan or other amino substitution method may be carried out either with recombinant soluble antigen, or where the target is a cell membrane target, directly on cells using transient or stable expression of the mutated versions.

[0393] In one embodiment, protein crystallography may be used to determine contact residues between antibody and antigen (i.e. to determine the epitope to which the antibody binds), crystallography allows the direct visualisation of contact residues involved in the antibody-antigen interaction. As well as standard X-ray crystallography, cryo-electro microscopy has been used to determine contact residues between antibodies and HIV capsid protein (see Lee, Jeong Hyun, et al. “Antibodies to a conformational epitope on gp41 neutralize HIV-1 by destabilizing the Env spike.”, Nature communications, 6, (2015)).

[0394] In one embodiment, if the antibody recognises a linear epitope, short peptides based on the antigen sequence can be produced and binding of the antibody to these peptides can be assessed using standard techniques, such as, but not limited to, SPR, HTRF, ELISA (which are described elsewhere herein). Further investigation of the epitope could be provided by performing an Alanine scan on any peptides that show binding. Alternative to linear peptides, conformational scans could be carried out using Pepscan technology (http://www.pepscan.com/) using their chemical linkage of peptides onto scaffolds, which has been used to determine discontinuous epitopes on CD20 targeting antibodies (Niederfellner, Gerhard, et al “Epitope characterization and crystal structure of GA101 provide insights into the molecular basis for type VII distinction of CD20 antibodies.”, Blood, 118.2, (2011), 358-367.).

[0395] In one embodiment, limited proteolytic digestion and mass spectrophotometry can be used to identify binding epitopes. The antibody-antigen complex is digested by a protease, such as, but not limited to, trypsin. The digested complex peptides are compared to antibody-alone and antigen-alone digestion mass spectrophotometry to determine if a particular epitope is protected by the complexation. Further work involving amino acid substitution, competition binding, may then be employed to narrow down to individual amino acid residues involved in the interaction (see, for example, Suckau, Detlev, et al. “Molecular epitope identification by limited proteolysis of an immobilized antigen-antibody complex and mass spectrometric peptide mapping.”, Proceedings of the National Academy of Sciences, 87.24, (1990), 9848-9852).

[0396] Thus, in one embodiment, the contact residues of the epitope are identified with an unrelated amino acid scan (e.g. alanine scan). In another embodiment, an unrelated amino acid scan (e.g. alanine scan) is carried out using a technique selected from SPR, HTRF, ELISA, X-ray crystallography, cryo-electro microscopy and a combination of limited proteolytic digestion and mass spectrometry. In one embodiment, the unrelated amino acid scan (e.g. alanine scan) is carried out using HTRF. In one embodiment, the unrelated amino acid scan (e.g. alanine scan) is carried out using ELISA.

[0397] When the alanine scan is carried out with either ELISA or HTRF, an amino acid residue is identified as contributing to the epitope if the reduction in signal is at least 25%. In one embodiment, the reduction in signal is at least 30%. In one embodiment, the reduction in signal is at least 35%. In one embodiment, the reduction in signal is at least 40%. In one embodiment, the reduction in signal is at least 45%. In one embodiment, the reduction in signal is at least 50%. In one embodiment, the reduction in signal is at least 55%. In one embodiment, the reduction in signal is at least 60%. In one embodiment, the reduction in signal is at least 70%. In one embodiment, the reduction in signal is at least 75%. In one embodiment, the reduction in signal is at least 80%. In one embodiment, the reduction in signal is at least 85%. In one embodiment, the reduction in signal is at least 90%.

[0398] When the alanine scan is carried out with SPR, an amino acid residue is identified as contributing to the epitope if there is at least a 10-fold reduction in affinity. In one embodiment, the reduction in affinity is at least 15-fold. In one embodiment, the reduction in affinity is at least 20-fold. In one embodiment, the reduction in affinity is at least 30-fold. In one embodiment, the reduction in affinity is at least 40-fold. In one embodiment, the reduction in affinity is at least 50-fold. In one embodiment, the reduction in affinity is at least 100-fold.

[0399] In one embodiment, the contact residues of the epitope are identified by X-ray crystallography. In one embodiment, the contact residues of the epitope are identified by cryo-electro microscopy. In one embodiment, the contact residues of the epitope are identified by a combination of limited proteolytic digestion and mass spectrometry.

Concept 14. The antibody or fragment according to concept 13, wherein the epitope is identified by unrelated amino acid scanning, or by X-ray crystallography.
Concept 15. The antibody or fragment according to concept 14, wherein the contact residues of the epitope are defined by a reduction in affinity of at least 10-fold in an unrelated amino acid scan, e.g. an alanine scan as determined by SPR.

[0400] In one embodiment, the reduction in affinity is at least 15-fold. In one embodiment, the reduction in affinity is at least 20-fold. In one embodiment, the reduction in affinity is at least 30-fold. In one embodiment, the reduction in affinity is at least 40-fold. In one embodiment, the reduction in affinity is at least 50-fold. In one embodiment, the reduction in affinity is at least 100-fold.

[0401] SPR may be carried out as described hereinabove.

Concept 16. An antibody or fragment thereof which competes for binding to hPD-L1 with the antibody 1D05.

[0402] Competition may be determined by surface plasmon resonance (SPR), such techniques being readily apparent to the skilled person. SPR may be carried out using Biacore™, Proteon™ or another standard SPR technique. Such competition may be due, for example, to the antibodies or fragments binding to identical or overlapping epitopes of hPD-L1. In one embodiment, competition is determined by ELISA, such techniques being readily apparent to the skilled person. In one embodiment, competition is determined by homogenous time resolved fluorescence (HTRF), such techniques being readily apparent to the skilled person. In one embodiment, competition is determined by fluorescence activated cell sorting (FACS), such techniques being readily apparent to the skilled person. In one embodiment, competition is determined by ForteBio Octet® Bio-Layer Interferometry (BLI) such techniques being readily apparent to the skilled person.

[0403] In one embodiment, the antibody or fragment competes (e.g. in a dose-dependent manner) with hPD-1 (or a fusion protein thereof) for binding to cell surface-expressed hPD-L1. In one embodiment, the antibody or fragment competes (e.g. in a dose-dependent manner) with hPD-1 (or a fusion protein thereof) for binding to soluble hPDL-1.

[0404] In one embodiment, the antibody or fragment partially or completely inhibits binding of PD-1 and/or CD80 to cell surface-expressed PD-L1, such as hPD-L1. In another embodiment, the antibody or fragment partially or completely inhibits binding of hPD-1 and/or CD80 to soluble hPD-L1. In some embodiments, the antibody or fragment partially or completely increases the secretion of IFNγ, CD25 and IL-2 from a cell having cell surface-expressed PD-1. In one embodiment, the antibody or fragment partially or completely inhibits binding of CD80 to soluble hPD-L1, but does not show any detectable inhibition of the binding of PD-1 to cell surface-expressed PD-L1. In one embodiment, the antibody or fragment partially or completely inhibits binding of CD80 to soluble hPD-L1, but does not show any detectable inhibition of the binding of PD-1 to soluble PD-L1.

[0405] As used herein, “inhibits”, “inhibition”, “inhibiting” and the like, as used herein refers to the ability of an antagonist (e.g. an antibody or fragment thereof) to bind to an epitope which either partially or completely prevents the binding of the receptor (e.g. CD80 or PD-1) to the ligand (e.g. PD-L1). If the epitope to which the antagonist binds completely blocks the binding site of the ligand, then ligand binding is completely prevented (which may be a physical blocking—in the case of overlapping epitopes—or steric blocking—where the antagonist is large such that it prevents the ligand binding to its distinct epitope), and the ligand is not removed from circulation. The concentration of circulating ligand may therefore appear to be increased. If the epitope to which the antagonist binds partially blocks the binding site of the ligand, the the ligand may be able to bind, but only weakly (in the case of partial inhibition), or in a different orientation to the natural binding interaction. In this case, some of the ligand may be removed from circulation, but not as much as when the ligand binding site is completely free and available for binding. Inhibition thus refers to the physical interaction of ligand and receptor. Inhibition can be measured by HTRF, which is described in more detail elsewhere herein and in Mathis (1995) Clinical Chemistry 41(9), 1391-1397. Inhibition can also be measured by flow cytometry, where receptor is expressed on cells, or by ELISA, where receptor is adsorbed onto plates.

[0406] Concept 16a. An antibody or fragment thereof which competes for binding to hPD-L1 with the antibody 84G09.

[0407] Concept 16b. An antibody or fragment thereof which competes for binding to hPD-L1 with the antibody 411608.

[0408] Concept 16c. An antibody or fragment thereof which competes for binding to hPD-L1 with the antibody 411C04.

[0409] Concept 16d. An antibody or fragment thereof which competes for binding to hPD-L1 with the antibody 411D07.

[0410] Concept 16e. An antibody or fragment thereof which competes for binding to hPD-L1 with the antibody 385F01.

[0411] Concept 16f. An antibody or fragment thereof which competes for binding to hPD-L1 with the antibody 386H03.

[0412] Concept 16g. An antibody or fragment thereof which competes for binding to hPD-L1 with the antibody 389A03.

[0413] Concept 16h. An antibody or fragment thereof which competes for binding to hPD-L1 with the antibody 413D08.

[0414] Concept 16i. An antibody or fragment thereof which competes for binding to hPD-L1 with the antibody 413G05.

[0415] Concept 16j. An antibody or fragment thereof which competes for binding to hPD-L1 with the antibody 413F09.

[0416] Concept 16k. An antibody or fragment thereof which competes for binding to hPD-L1 with the antibody 414E306.

[0417] Concept 16l. An antibody or fragment thereof which competes for binding to hPD-L1 with the antibody 416E01.

[0418] The antibodies have the sequences as described hereinabove.

Concept 17. The antibody or fragment according to any one of concepts 10 to 16, wherein the V_{H} domain comprises the CDRH3 sequence of SEQ ID NO:29 or 32, or the CDRH3 sequence of SEQ ID NO:29 or 32 comprising 6 or fewer amino acid substitutions.

[0419] Concept 17a: An antibody or a fragment thereof according to any one of concepts 10 to 16 (but when dependent on concept 13, it is dependent on concept 13a, and when dependent on concept 16, it is dependent on concept 16a), wherein the V_{H} domain comprises the CDRH3 sequence of SEQ ID NO:9 or 12, or the CDRH3 sequence of SEQ ID NO:9 or 12 comprising 6 or fewer amino acid substitutions.

[0420] Concept 17b: An antibody or a fragment thereof according to any one of concepts 10 to 16 (but when dependent on concept 13, it is dependent on concept 13b, and when dependent on concept 16, it is dependent on concept 16b), wherein the V_{H} domain comprises the CDRH3 sequence of SEQ ID NO:54 or 57, or the CDRH3 sequence of SEQ ID NO:54 or 57 comprising 6 or fewer amino acid substitutions.

[0421] Concept 17c: An antibody or a fragment thereof according to any one of concepts 10 to 16 (but when dependent on concept 13, it is dependent on concept 13c, and when dependent on concept 16, it is dependent on concept 16c), wherein the a V_{H} domain comprises the CDRH3 sequence of SEQ ID NO:74 or 77, or the CDRH3 sequence of SEQ ID NO:74 or 77 comprising 6 or fewer amino acid substitutions.

[0422] Concept 17d: An antibody or a fragment thereof according to any one of concepts 10 to 16 (but when dependent on concept 13, it is dependent on concept 13d, and when dependent on concept 16, it is dependent on concept 16d), wherein the V_{H} domain comprises the CDRH3 sequence of SEQ ID NO:94 or 97, or the CDRH3 sequence of SEQ ID NO:94 or 97 comprising 3 or fewer amino acid substitutions.

[0423] Concept 17e: An antibody or a fragment thereof according to any one of concepts 10 to 16 (but when dependent on concept 13, it is dependent on concept 13e, and when dependent on concept 16, it is dependent on concept 16e), wherein the V_{H} domain comprises the CDRH3 sequence of SEQ ID NO:114 or 117, or the CDRH3 sequence of SEQ ID NO:114 or 117 comprising 6 or fewer amino acid substitutions.

[0424] Concept 17f: An antibody or a fragment thereof according to any one of concepts 10 to 16 (but when dependent on concept 13, it is dependent on concept 13f, and when dependent on concept 16, it is dependent on concept 16f), wherein the V_{H} domain comprises the CDRH3 sequence of SEQ ID NO:144 or 147, or the CDRH3 sequence of SEQ ID NO:144 or 147 comprising 3 or fewer amino acid substitutions.

[0425] Concept 17g: An antibody or a fragment thereof according to any one of concepts 10 to 16 (but when dependent on concept 13, it is dependent on concept 13g, and when dependent on concept 16, it is dependent on concept 16g), wherein the V_{H} domain comprises the CDRH3 sequence of SEQ ID NO:174 or 177, or the CDRH3 sequence of SEQ ID NO:174 or 177 comprising 6 or fewer amino acid substitutions.

[0426] Concept 17h: An antibody or a fragment thereof according to any one of concepts 10 to 16 (but when dependent on concept 13, it is dependent on concept 13h, and when dependent on concept 16, it is dependent on concept 16h), wherein the V_{H} domain comprises the CDRH3 sequence of SEQ ID NO:134 or 137, or the CDRH3 sequence of SEQ ID NO:134 or 137 comprising 5 or fewer amino acid substitutions.

[0427] Concept 17i: An antibody or a fragment thereof according to any one of concepts 10 to 16 (but when dependent on concept 13, it is dependent on concept 13i, and when dependent on concept 16, it is dependent on concept 16i), wherein the V_{H} domain comprises the CDRH3 sequence of SEQ ID NO:240 or 243, or the CDRH3 sequence of SEQ ID NO:240 or 243 comprising 6 or fewer amino acid substitutions.

[0428] Concept 17j: An antibody or a fragment thereof according to any one of concepts 10 to 16 (but when dependent on concept 13, it is dependent on concept 13j, and when dependent on concept 16, it is dependent on concept 16j), wherein the a V_{H} domain comprises the CDRH3 sequence of SEQ ID NO:260 or 263, or the CDRH3 sequence of SEQ ID NO:260 or 263 comprising 6 or fewer amino acid substitutions.

[0429] Concept 17k: An antibody or a fragment thereof according to any one of concepts 10 to 16 (but when dependent on concept 13, it is dependent on concept 13k, and when dependent on concept 16, it is dependent on concept 16k), wherein the V_{H} domain comprises the CDRH3 sequence of SEQ ID NO:280 or 283, or the CDRH3 sequence of SEQ ID NO:280 or 283 comprising 6 or fewer amino acid substitutions.

[0430] Concept 17l: An antibody or a fragment thereof according to any one of concepts 10 to 16 (but when dependent on concept 13, it is dependent on concept 13l, and when dependent on concept 16, it is dependent on concept 16l), wherein the V_{H} domain comprises the CDRH3 sequence of SEQ ID NO:345 or 348, or the CDRH3 sequence of SEQ ID NO:345 or 348 comprising 6 or fewer amino acid substitutions.

Concept 18. The antibody or fragment according to any preceding concept, wherein the V_{H} domain comprises the CDRH1 sequence of SEQ ID NO:27 or 30 or the CDRH1 sequence of SEQ ID NO:27 or 30 comprising 3, 2 or 1 amino acid substitution(s).

[0431] Concept 18a: An antibody or a fragment thereof according to any preceding concept (but when dependent on concept 9, it is dependent on concept 9a, when dependent on concept 13, it is dependent on concept 13a, when dependent on concept 16, it is dependent on concept 16a, and when dependent on concept 17, it is dependent on concept 17a), wherein the V_{H} domain comprises the CDRH1 sequence of SEQ ID NO:7 or 10, or the CDRH1 sequence of SEQ ID NO:7 or 10 comprising 3, 2 or 1 amino acid substitution(s).

[0432] Concept 18b: An antibody or a fragment thereof according to any preceding concept (but when dependent on concept 9, it is dependent on concept 9b, when dependent on concept 13, it is dependent on concept 13b, when dependent on concept 16, it is dependent on concept 16b, and when dependent on concept 17, it is dependent on concept 17b), wherein the V_{H} domain comprises the CDRH1 sequence of SEQ ID NO:52 or 55, or the CDRH1 sequence of SEQ ID NO:52 or 55 comprising 3, 2 or 1 amino acid substitution(s).

[0433] Concept 18c: An antibody or a fragment thereof according to any preceding concept (but when dependent on concept 9, it is dependent on concept 9c, when dependent on concept 13, it is dependent on concept 13c, when dependent on concept 16, it is dependent on concept 16c, and when dependent on concept 17, it is dependent on concept 17c), wherein the V_{H} domain comprises the CDRH1 sequence of SEQ ID NO:72 or 75, or the CDRH1 sequence of SEQ ID NO:72 or 75 comprising 3, 2 or 1 amino acid substitution(s).

[0434] Concept 18d: An antibody or a fragment thereof according to any preceding concept (but when dependent on concept 9, it is dependent on concept 9d, when dependent on concept 13, it is dependent on concept 13d, when dependent on concept 16, it is dependent on concept 16d, and when dependent on concept 17, it is dependent on concept 17d), wherein the V_{H} domain comprises the CDRH1 sequence of SEQ ID NO:92 or 95, or the CDRH1 sequence of SEQ ID NO:92 or 95 comprising 3, 2 or 1 amino acid substitution(s).

[0435] Concept 18e: An antibody or a fragment thereof according to any preceding concept (but when dependent on concept 9, it is dependent on concept 9e, when dependent on concept 13, it is dependent on concept 13e, when dependent on concept 16, it is dependent on concept 16e, and when dependent on concept 17, it is dependent on concept 17e), wherein the V_{H} domain comprises the CDRH1 sequence of SEQ ID NO:112 or 115, or the CDRH1 sequence of SEQ ID NO:112 or 115 comprising 3, 2 or 1 amino acid substitution(s).

[0436] Concept 18f: An antibody or a fragment thereof according to any preceding concept (but when dependent on concept 9, it is dependent on concept 9f, when dependent on concept 13, it is dependent on concept 13f, when dependent on concept 16, it is dependent on concept 16f, and when dependent on concept 17, it is dependent on concept 17f), wherein the V_{H} domain comprises the CDRH1 sequence of SEQ ID NO:142 or 145, or the CDRH1 sequence of SEQ ID NO:142 or 145 comprising 3, 2 or 1 amino acid substitution(s).

[0437] Concept 18g: An antibody or a fragment thereof according to any preceding concept (but when dependent on concept 9, it is dependent on concept 9g, when dependent on concept 13, it is dependent on concept 13g, when dependent on concept 16, it is dependent on concept 16g, and when dependent on concept 17, it is dependent on concept 17g), wherein the V_{H} domain comprises the CDRH1 sequence of SEQ ID NO:172 or 175, or the CDRH1 sequence of SEQ ID NO:172 or 175 comprising 3, 2 or 1 amino acid substitution(s).

[0438] Concept 18h: An antibody or a fragment thereof according to any preceding concept (but when dependent on concept 9, it is dependent on concept 9h, when dependent on concept 13, it is dependent on concept 13h, when dependent on concept 16, it is dependent on concept 16h, and when dependent on concept 17, it is dependent on concept 17h), wherein the V_{H} domain comprises the CDRH1 sequence of SEQ ID NO:132 or 135, or the CDRH1 sequence of SEQ ID NO:132 or 135 comprising 3, 2 or 1 amino acid substitution(s).

[0439] Concept 18i: An antibody or a fragment thereof according to any preceding concept (but when dependent on concept 9, it is dependent on concept 9i, when dependent on concept 13, it is dependent on concept 13i, when dependent on concept 16, it is dependent on concept 16i, and when dependent on concept 17, it is dependent on concept 17i), wherein the V_{H} domain comprises the CDRH1 sequence of SEQ ID NO:238 or 241, or the CDRH1 sequence of SEQ ID NO:238 or 241 comprising 3, 2 or 1 amino acid substitution(s).

[0440] Concept 18j: An antibody or a fragment thereof according to any preceding concept (but when dependent on concept 9, it is dependent on concept 9j, when dependent on concept 13, it is dependent on concept 13j, when dependent on concept 16, it is dependent on concept 16j, and when dependent on concept 17, it is dependent on concept 17j), wherein the V_{H} domain comprises the CDRH1 sequence of SEQ ID NO:258 or 261, or the CDRH1 sequence of SEQ ID NO:258 or 261 comprising 3, 2 or 1 amino acid substitution(s).

[0441] Concept 18k: An antibody or a fragment thereof according to any preceding concept (but when dependent on concept 9, it is dependent on concept 9k, when dependent on concept 13, it is dependent on concept 13k, when dependent on concept 16, it is dependent on concept 16k, and when dependent on concept 17, it is dependent on concept 17k), wherein the V_{H} domain comprises the CDRH1 sequence of SEQ ID NO: 278 or 281, or the CDRH1 sequence of SEQ ID NO: 278 or 281 comprising 3, 2 or 1 amino acid substitution(s).

[0442] Concept 18l: An antibody or a fragment thereof according to any preceding concept (but when dependent on concept 9, it is dependent on concept 9l, when dependent on concept 13, it is dependent on concept 13l, when dependent on concept 16, it is dependent on concept 16l, and when dependent on concept 17, it is dependent on concept 17l), wherein the V_{H} domain comprises the CDRH1 sequence of SEQ ID NO: 343 or 346, or the CDRH1 sequence of SEQ ID NO: 343 or 346 comprising 3, 2 or 1 amino acid substitution(s).

Concept 19. The antibody or fragment according to any preceding concept, wherein the V_{H} domain comprises the CDRH2 sequence of SEQ ID NO:28 or 31, or the CDRH2 sequence of SEQ ID NO:28 or 31 comprising 4 or fewer amino acid substitutions.

[0443] Concept 19a: An antibody or a fragment thereof according to any preceding concept (but when dependent on concept 9, it is dependent on concept 9a, when dependent on concept 13, it is dependent on concept 13a, when dependent on concept 16, it is dependent on concept 16a, when dependent on concept 17, it is dependent on concept 17a, and when dependent on concept 18, it is dependent on concept 18a), wherein the V_{H} domain comprises the CDRH2 sequence of SEQ ID NO:8 or 11, or the CDRH2 sequence of SEQ ID NO:8 or 11 comprising 4 or fewer amino acid substitutions.

[0444] Concept 19b: An antibody or a fragment thereof according to any preceding concept (but when dependent on concept 9, it is dependent on concept 9b, when dependent on concept 13, it is dependent on concept 13b, when dependent on concept 16, it is dependent on concept 16b, when dependent on concept 17, it is dependent on concept 17b, and when dependent on concept 18, it is dependent on concept 18b), wherein the V_{H} domain comprises the CDRH2 sequence of SEQ ID NO:53 or 56, or the CDRH2 sequence of SEQ ID NO:53 or 56 comprising 3, 2 or 1 amino acid substitution(s).

[0445] Concept 19c: An antibody or a fragment thereof according to any preceding concept (but when dependent on concept 9, it is dependent on concept 9c, when dependent on concept 13, it is dependent on concept 13c, when dependent on concept 16, it is dependent on concept 16c, when dependent on concept 17, it is dependent on concept 17c, and when dependent on concept 18, it is dependent on concept 18c), wherein the V_{H} domain comprises the CDRH2 sequence of SEQ ID NO:73 or 76, or the CDRH2 sequence of SEQ ID NO:73 or 76 comprising 3, 2 or 1 amino acid substitution(s).

[0446] Concept 19d: An antibody or a fragment thereof according to any preceding concept (but when dependent on concept 9, it is dependent on concept 9d, when dependent on concept 13, it is dependent on concept 13d, when dependent on concept 16, it is dependent on concept 16d, when dependent on concept 17, it is dependent on concept 17d, and when dependent on concept 18, it is dependent on concept 18d), wherein the V_{H} domain comprises the CDRH2 sequence of SEQ ID NO:93 or 96, or the CDRH2 sequence of SEQ ID NO:93 or 96 comprising 3, 2 or 1 amino acid substitution(s).

[0447] Concept 19e: An antibody or a fragment thereof according to any preceding concept (but when dependent on concept 9, it is dependent on concept 9e, when dependent on concept 13, it is dependent on concept 13e, when dependent on concept 16, it is dependent on concept 16e, when dependent on concept 17, it is dependent on concept 17e, and when dependent on concept 18, it is dependent on concept 18e), wherein the V_{H} domain comprises the CDRH2 sequence of SEQ ID NO:113 or 116, or the CDRH2 sequence of SEQ ID NO:113 or 116 comprising 3, 2 or 1 amino acid substitution(s).

[0448] Concept 19f: An antibody or a fragment thereof according to any preceding concept (but when dependent on concept 9, it is dependent on concept 9f, when dependent on concept 13, it is dependent on concept 13f, when dependent on concept 16, it is dependent on concept 16f, when dependent on concept 17, it is dependent on concept 17f, and when dependent on concept 18, it is dependent on concept 18f), wherein the V_{H} domain comprises the CDRH2 sequence of SEQ ID NO:143 or 146, or the CDRH2 sequence of SEQ ID NO:143 or 146 comprising 3, 2 or 1 amino acid substitution(s).

[0449] Concept 19g: An antibody or a fragment thereof according to any preceding concept (but when dependent on concept 9, it is dependent on concept 9g, when dependent on concept 13, it is dependent on concept 13g, when dependent on concept 16, it is dependent on concept 16g, when dependent on concept 17, it is dependent on concept 17g, and when dependent on concept 18, it is dependent on concept 18g), wherein the V_{H} domain comprises the CDRH2 sequence of SEQ ID NO:173 or 176, or the CDRH2 sequence of SEQ ID NO:173 or 176 comprising 3, 2 or 1 amino acid substitution(s).

[0450] Concept 19h: An antibody or a fragment thereof according to any preceding concept (but when dependent on concept 9, it is dependent on concept 9h, when dependent on concept 13, it is dependent on concept 13h, when dependent on concept 16, it is dependent on concept 16h, when dependent on concept 17, it is dependent on concept 17h, and when dependent on concept 18, it is dependent on concept 18h), wherein the V_{H} domain comprises the CDRH2 sequence of SEQ ID NO:133 or 136, or the CDRH2 sequence of SEQ ID NO:133 or 136 comprising 3, 2 or 1 amino acid substitution(s).

[0451] Concept 19i: An antibody or a fragment thereof according to any preceding concept (but when dependent on concept 9, it is dependent on concept 9i, when dependent on concept 13, it is dependent on concept 13i, when dependent on concept 16, it is dependent on concept 16i, when dependent on concept 17, it is dependent on concept 17i, and when dependent on concept 18, it is dependent on concept 18i), wherein the V_{H} domain comprises the CDRH2 sequence of SEQ ID NO:239 or 242, or the CDRH2 sequence of SEQ ID NO:239 or 242 comprising 3, 2 or 1 amino acid substitution(s).

[0452] Concept 19j: An antibody or a fragment thereof according to any preceding concept (but when dependent on concept 9, it is dependent on concept 9j, when dependent on concept 13, it is dependent on concept 13j, when dependent on concept 16, it is dependent on concept 16j, when dependent on concept 17, it is dependent on concept 17j, and when dependent on concept 18, it is dependent on concept 18j), wherein the V_{H} domain comprises the CDRH2 sequence of SEQ ID NO:259 or 262, or the CDRH2 sequence of SEQ ID NO:259 or 262 comprising 3, 2 or 1 amino acid substitution(s).

[0453] Concept 19k: An antibody or a fragment thereof according to any preceding concept (but when dependent on concept 9, it is dependent on concept 9k, when dependent on concept 13, it is dependent on concept 13k, when dependent on concept 16, it is dependent on concept 16k, when dependent on concept 17, it is dependent on concept 17k, and when dependent on concept 18, it is dependent on concept 18k), wherein the V_{H} domain comprises the CDRH2 sequence of SEQ ID NO:279 or 282, or the CDRH2 sequence of SEQ ID NO:279 or 282 comprising 3, 2 or 1 amino acid substitution(s).

[0454] Concept 19l: An antibody or a fragment thereof according to any preceding concept (but when dependent on concept 9, it is dependent on concept 9l, when dependent on concept 13, it is dependent on concept 13l, when dependent on concept 16, it is dependent on concept 16l, when dependent on concept 17, it is dependent on concept 17l, and when dependent on concept 18, it is dependent on concept 18l), wherein the Vii domain comprises the CDRH2 sequence of SEQ ID NO:344 or 347, or the CDRH2 sequence of SEQ ID NO:344 or 347 comprising 3, 2 or 1 amino acid substitution(s).

Concept 20. The antibody or fragment according to any preceding concept, wherein the V_{H} domain comprises an amino acid sequence of SEQ ID NO:33, or a heavy chain variable domain amino acid sequence that is at least 80% (e.g. at least 85%, or at least 90%) identical to SEQ ID NO:33.

[0455] Concept 20a: An antibody or a fragment thereof according to any preceding concept (but when dependent on concept 9, it is dependent on concept 9a, when dependent on concept 13, it is dependent on concept 13a, when dependent on concept 16, it is dependent on concept 16a, when dependent on concept 17, it is dependent on concept 17a, when dependent on concept 18, it is dependent on concept 18a, and when dependent on concept 19, it is dependent on concept 19a), wherein the V_{H} domain comprises an amino acid sequence of SEQ ID NO:13, or a heavy chain variable domain amino acid sequence that is at least 80% (e.g. at least 85%, or at least 90%) identical to SEQ ID NO:13.

[0456] Concept 20b: An antibody or a fragment thereof according to any preceding concept (but when dependent on concept 9, it is dependent on concept 9b, when dependent on concept 13, it is dependent on concept 13b, when dependent on concept 16, it is dependent on concept 16b, when dependent on concept 17, it is dependent on concept 17b, when dependent on concept 18, it is dependent on concept 18b, and when dependent on concept 19, it is dependent on concept 19b), wherein the V_{H} domain comprises an amino acid sequence of SEQ ID NO:58, or a heavy chain variable domain amino acid sequence that is at least 80% (e.g. at least 85%, or at least 90%) identical to SEQ ID NO:58.

[0457] Concept 20c: An antibody or a fragment thereof according to any preceding concept (but when dependent on concept 9, it is dependent on concept 9c, when dependent on concept 13, it is dependent on concept 13c, when dependent on concept 16, it is dependent on concept 16c, when dependent on concept 17, it is dependent on concept 17c, when dependent on concept 18, it is dependent on concept 18c, and when dependent on concept 19, it is dependent on concept 19c), wherein the V_{H} domain comprises an amino acid sequence of SEQ ID NO:78, or a heavy chain variable domain amino acid sequence that is at least 80% (e.g. at least 85%, or at least 90%) identical to SEQ ID NO:78.

[0458] Concept 20d: An antibody or a fragment thereof according to any preceding concept (but when dependent on concept 9, it is dependent on concept 9d, when dependent on concept 13, it is dependent on concept 13d, when dependent on concept 16, it is dependent on concept 16d, when dependent on concept 17, it is dependent on concept 17d, when dependent on concept 18, it is dependent on concept 18d, and when dependent on concept 19, it is dependent on concept 19d), wherein the V_{H} domain comprises an amino acid sequence of SEQ ID NO:98, or a heavy chain variable domain amino acid sequence that is at least 80% (e.g. at least 85%, or at least 90%) identical to SEQ ID NO:98.

[0459] Concept 20e: An antibody or a fragment thereof according to any preceding concept (but when dependent on concept 9, it is dependent on concept 9e, when dependent on concept 13, it is dependent on concept 13e, when dependent on concept 16, it is dependent on concept 16e, when dependent on concept 17, it is dependent on concept 17e, when dependent on concept 18, it is dependent on concept 18e, and when dependent on concept 19, it is dependent on concept 19e), wherein the V_{H} domain comprises an amino acid sequence of SEQ ID NO:118, or a heavy chain variable domain amino acid sequence that is at least 80% (e.g. at least 85%, or at least 90%) identical to SEQ ID NO:118.

[0460] Concept 20f: An antibody or a fragment thereof according to any preceding concept (but when dependent on concept 9, it is dependent on concept 9f, when dependent on concept 13, it is dependent on concept 13f, when dependent on concept 16, it is dependent on concept 16f, when dependent on concept 17, it is dependent on concept 17f, when dependent on concept 18, it is dependent on concept 18f, and when dependent on concept 19, it is dependent on concept 19f), wherein the V_{H} domain comprises an amino acid sequence of SEQ ID NO:158, or a heavy chain variable domain amino acid sequence that is at least 80% (e.g. at least 85%, or at least 90%) identical to SEQ ID NO:158.

[0461] Concept 20g: An antibody or a fragment thereof according to any preceding concept (but when dependent on concept 9, it is dependent on concept 9g, when dependent on concept 13, it is dependent on concept 13g, when dependent on concept 16, it is dependent on concept 16g, when dependent on concept 17, it is dependent on concept 17g, when dependent on concept 18, it is dependent on concept 18g, and when dependent on concept 19, it is dependent on concept 19g), wherein the V_{H} domain comprises an amino acid sequence of SEQ ID NO:178, or a heavy chain variable domain amino acid sequence that is at least 80% (e.g. at least 85%, or at least 90%) identical to SEQ ID NO:178.

[0462] Concept 20h: An antibody or a fragment thereof according to any preceding concept (but when dependent on concept 9, it is dependent on concept 9h, when dependent on concept 13, it is dependent on concept 13h, when dependent on concept 16, it is dependent on concept 16h, when dependent on concept 17, it is dependent on concept 17h, when dependent on concept 18, it is dependent on concept 18h, and when dependent on concept 19, it is dependent on concept 19h), wherein the V_{H} domain comprises an amino acid sequence of SEQ ID NO:138, or a heavy chain variable domain amino acid sequence that is at least 80% (e.g. at least 85%, or at least 90%) identical to SEQ ID NO:138.

[0463] Concept 20i: An antibody or a fragment thereof according to any preceding concept (but when dependent on concept 9, it is dependent on concept 9i, when dependent on concept 13, it is dependent on concept 13i, when dependent on concept 16, it is dependent on concept 16i, when dependent on concept 17, it is dependent on concept 17i, when dependent on concept 18, it is dependent on concept 18i, and when dependent on concept 19, it is dependent on concept 19i), wherein the V_{H} domain comprises an amino acid sequence of SEQ ID NO:244, or a heavy chain variable domain amino acid sequence that is at least 80% (e.g. at least 85%, or at least 90%) identical to SEQ ID NO:244.

[0464] Concept 20j: An antibody or a fragment thereof according to any preceding concept (but when dependent on concept 9, it is dependent on concept 9j, when dependent on concept 13, it is dependent on concept 13j, when dependent on concept 16, it is dependent on concept 16j, when dependent on concept 17, it is dependent on concept 17j, when dependent on concept 18, it is dependent on concept 18j, and when dependent on concept 19, it is dependent on concept 19j), wherein the V_{H} domain comprises an amino acid sequence of SEQ ID NO:264, or a heavy chain variable domain amino acid sequence that is at least 80% (e.g. at least 85%, or at least 90%) identical to SEQ ID NO:264.

[0465] Concept 20k: An antibody or a fragment thereof according to any preceding concept (but when dependent on concept 9, it is dependent on concept 9k, when dependent on concept 13, it is dependent on concept 13k, when dependent on concept 16, it is dependent on concept 16k, when dependent on concept 17, it is dependent on concept 17k, when dependent on concept 18, it is dependent on concept 18k, and when dependent on concept 19, it is dependent on concept 19k), wherein the V_{H} domain comprises an amino acid sequence of SEQ ID NO:284, or a heavy chain variable domain amino acid sequence that is at least 80% (e.g. at least 85%, or at least 90%) identical to SEQ ID NO:284.

[0466] Concept 20l: An antibody or a fragment thereof according to any preceding concept (but when dependent on concept 9, it is dependent on concept 9l, when dependent on concept 13, it is dependent on concept 13l, when dependent on concept 16, it is dependent on concept 16l, when dependent on concept 17, it is dependent on concept 17l, when dependent on concept 18, it is dependent on concept 18l, and when dependent on concept 19, it is dependent on concept 19l), wherein the V_{H} domain comprises an amino acid sequence of SEQ ID NO:349, or a heavy chain variable domain amino acid sequence that is at least 80% (e.g. at least 85%, or at least 90%) identical to SEQ ID NO:349.

[0467] In one embodiment, the amino acid sequence is at least 70% identical to the specified Seq ID No. In one embodiment, the amino acid sequence is at least 75% identical to the specified Seq ID No. In one embodiment, the amino acid sequence is at least 95% identical to the specified Seq ID No. In one embodiment, the amino acid sequence is at least 96% identical to the specified Seq ID No. In one embodiment, the amino acid sequence is at least 97% identical to the specified Seq ID No. In one embodiment, the amino acid sequence is at least 98% identical to the specified Seq ID No. In one embodiment, the amino acid sequence is at least 99% identical to the specified Seq ID No. In one embodiment, the amino acid sequence is at least 99.5% identical to the specified Seq ID No.

Concept 21. The antibody or fragment according to any preceding concept comprising first and second copies of said V_{H} domain.

[0468] Concept 22. The antibody or fragment according to any preceding concept, comprising a V_{L} domain which comprises the CDRL1 sequence of SEQ ID NO:37 or 40, or the CRDL1 sequence of SEQ ID NO:37 or 40 comprising 3 or fewer amino acid substitutions.

[0469] Concept 22a: An antibody or a fragment thereof according to any preceding concept (but when dependent on concept 9, it is dependent on concept 9a, when dependent on concept 13, it is dependent on concept 13a, when dependent on concept 16, it is dependent on concept 16a, when dependent on concept 17, it is dependent on concept 17a, when dependent on concept 18, it is dependent on concept 18a, when dependent on concept 19, it is dependent on concept 19a, and when dependent on concept 20, it is dependent on concept 20a), comprising a V_{L} domain, which comprises the CDRL1 sequence of SEQ ID NO:17 or 20, or the CDRL1 sequence of SEQ ID NO:17 or 20 comprising 3 or fewer amino acid substitutions.

[0470] Concept 22b: An antibody or a fragment thereof according to any preceding concept (but when dependent on concept 9, it is dependent on concept 9b, when dependent on concept 13, it is dependent on concept 13b, when dependent on concept 16, it is dependent on concept 16b, when dependent on concept 17, it is dependent on concept 17b, when dependent on concept 18, it is dependent on concept 18b, when dependent on concept 19, it is dependent on concept 19b, and when dependent on concept 20, it is dependent on concept 20b), comprising a V_{L} domain which comprises the CDRL1 sequence of SEQ ID NO:62 or 65, or the CDRL1 sequence of SEQ ID NO:62 or 65 comprising 3 or fewer amino acid substitutions.

[0471] Concept 22c: An antibody or a fragment thereof according to any preceding concept (but when dependent on concept 9, it is dependent on concept 9c, when dependent on concept 13, it is dependent on concept 13c, when dependent on concept 16, it is dependent on concept 16c, when dependent on concept 17, it is dependent on concept 17c, when dependent on concept 18, it is dependent on concept 18c, when dependent on concept 19, it is dependent on concept 19c, and when dependent on concept 20, it is dependent on concept 20c), comprising a V_{L} domain which comprises the CDRL1 sequence of SEQ ID NO:82 or 85, or the CDRL1 sequence of SEQ ID NO:82 or 85 comprising 2 or 1 amino acid substitution(s).

[0472] Concept 22d: An antibody or a fragment thereof according to any preceding concept (but when dependent on concept 9, it is dependent on concept 9d, when dependent on concept 13, it is dependent on concept 13d, when dependent on concept 16, it is dependent on concept 16d, when dependent on concept 17, it is dependent on concept 17d, when dependent on concept 18, it is dependent on concept 18d, when dependent on concept 19, it is dependent on concept 19d, and when dependent on concept 20, it is dependent on concept 20d), comprising a V_{L} domain which comprises the CDRL1 sequence of SEQ ID NO:102 or 105, or the CDRL1 sequence of SEQ ID NO:102 or 105 comprising 5 or fewer amino acid substitutions.

[0473] Concept 22e: An antibody or a fragment thereof according to any preceding concept (but when dependent on concept 9, it is dependent on concept 9e, when dependent on concept 13, it is dependent on concept 13e, when dependent on concept 16, it is dependent on concept 16e, when dependent on concept 17, it is dependent on concept 17e, when dependent on concept 18, it is dependent on concept 18e, when dependent on concept 19, it is dependent on concept 19e, and when dependent on concept 20, it is dependent on concept 20e), comprising a V_{L} domain which comprises the CDRL1 sequence of SEQ ID NO:122 or 125, or the CDRL1 sequence of SEQ ID NO:122 or 125 comprising 2 or 1 amino acid substitution(s).

[0474] Concept 22f: An antibody or a fragment thereof according to any preceding concept (but when dependent on concept 9, it is dependent on concept 9f, when dependent on concept 13, it is dependent on concept 13f, when dependent on concept 16, it is dependent on concept 16f, when dependent on concept 17, it is dependent on concept 17f, when dependent on concept 18, it is dependent on concept 18f, when dependent on concept 19, it is dependent on concept 19f, and when dependent on concept 20, it is dependent on concept 20f), comprising a V_{L} domain which comprises the CDRL1 sequence of SEQ ID NO:162 or 165, or the CDRL1 sequence of SEQ ID NO:162 or 165 comprising 5 or fewer amino acid substitutions.

[0475] Concept 22g: An antibody or a fragment thereof according to any preceding concept (but when dependent on concept 9, it is dependent on concept 9g, when dependent on concept 13, it is dependent on concept 13g, when dependent on concept 16, it is dependent on concept 16g, when dependent on concept 17, it is dependent on concept 17g, when dependent on concept 18, it is dependent on concept 18g, when dependent on concept 19, it is dependent on concept 19g, and when dependent on concept 20, it is dependent on concept 20g), comprising a V_{L} domain which comprises the CDRL1 sequence of SEQ ID NO:182 or 185, or the CDRL1 sequence of SEQ ID NO:182 or 185 comprising 5 or fewer amino acid substitutions.

[0476] Concept 22h: An antibody or a fragment thereof according to any preceding concept (but when dependent on concept 9, it is dependent on concept 9h, when dependent on concept 13, it is dependent on concept 13h, when dependent on concept 16, it is dependent on concept 16h, when dependent on concept 17, it is dependent on concept 17h, when dependent on concept 18, it is dependent on concept 18h, when dependent on concept 19, it is dependent on concept 19h, and when dependent on concept 20, it is dependent on concept 20h), comprising a V_{L} domain which comprises the CDRL1 sequence of SEQ ID NO:142 or 145, or the CDRL1 sequence of SEQ ID NO:142 or 145 comprising 2 or 1 amino acid substitution(s).

[0477] Concept 22i: An antibody or a fragment thereof according to any preceding concept (but when dependent on concept 9, it is dependent on concept 9i, when dependent on concept 13, it is dependent on concept 13i, when dependent on concept 16, it is dependent on concept 16i, when dependent on concept 17, it is dependent on concept 17i, when dependent on concept 18, it is dependent on concept 18i, when dependent on concept 19, it is dependent on concept 19i, and when dependent on concept 20, it is dependent on concept 20i), comprising a V_{L} domain which comprises the CDRL1 sequence of SEQ ID NO:248 or 251, or the CDRL1 sequence of SEQ ID NO:248 or 251 comprising 2 or 1 amino acid substitution(s).

[0478] Concept 22j: An antibody or a fragment thereof according to any preceding concept (but when dependent on concept 9, it is dependent on concept 9j, when dependent on concept 13, it is dependent on concept 13j, when dependent on concept 16, it is dependent on concept 16j, when dependent on concept 17, it is dependent on concept 17j, when dependent on concept 18, it is dependent on concept 18j, when dependent on concept 19, it is dependent on concept 19j, and when dependent on concept 20, it is dependent on concept 20j), comprising a V_{L} domain which comprises the CDRL1 sequence of SEQ ID NO:268 or 271, or the CDRL1 sequence of SEQ ID NO:268 or 271 comprising 2 or 1 amino acid substitution(s).

[0479] Concept 22k: An antibody or a fragment thereof according to any preceding concept (but when dependent on concept 9, it is dependent on concept 9k, when dependent on concept 13, it is dependent on concept 13k, when dependent on concept 16, it is dependent on concept 16k, when dependent on concept 17, it is dependent on concept 17k, when dependent on concept 18, it is dependent on concept 18k, when dependent on concept 19, it is dependent on concept 19k, and when dependent on concept 20, it is dependent on concept 20k), comprising a V_{L} domain which comprises the CDRL1 sequence of SEQ ID NO:288 or 291, or the CDRL1 sequence of SEQ ID NO:288 or 291 comprising 2 or 1 amino acid substitution(s).

[0480] Concept 22l: An antibody or a fragment thereof according to any preceding concept (but when dependent on concept 9, it is dependent on concept 9l, when dependent on concept 13, it is dependent on concept 13l, when dependent on concept 16, it is dependent on concept 16l, when dependent on concept 17, it is dependent on concept 17l, when dependent on concept 18, it is dependent on concept 18l, when dependent on concept 19, it is dependent on concept 19l, and when dependent on concept 20, it is dependent on concept 20l), comprising a V_{L} domain which comprises the CDRL1 sequence of SEQ ID NO:353 or 356, or the CDRL1 sequence of SEQ ID NO:353 or 356 comprising 2 or 1 amino acid substitution(s).

Concept 23. The antibody or fragment according to any preceding concept, comprising a or said V_{L} domain, which V_{L} domain comprises the CDRL2 sequence of SEQ ID NO:38 or 41, or the CRDL2 sequence of SEQ ID NO:38 or 41 comprising 2 or 1 amino acid substitution(s), for example a CDRL2 sequence of Seq ID No:50.

[0481] Concept 23a: An antibody or a fragment thereof according to any preceding concept (but when dependent on concept 9, it is dependent on concept 9a, when dependent on concept 13, it is dependent on concept 13a, when dependent on concept 16, it is dependent on concept 16a, when dependent on concept 17, it is dependent on concept 17a, when dependent on concept 18, it is dependent on concept 18a, when dependent on concept 19, it is dependent on concept 19a, when dependent on concept 20, it is dependent on concept 20a, and when dependent on concept 22, it is dependent on concept 22a), comprising a or said V_{L} domain, which V_{L} domain comprises the CDRL2 sequence of SEQ ID NO:18 or 21, or the CDRL2 sequence of SEQ ID NO:18 or 21 comprising 2 or 1 amino acid substitution(s).

[0482] Concept 23b: An antibody or a fragment thereof according to any preceding concept (but when dependent on concept 9, it is dependent on concept 9b, when dependent on concept 13, it is dependent on concept 13b, when dependent on concept 16, it is dependent on concept 16b, when dependent on concept 17, it is dependent on concept 17b, when dependent on concept 18, it is dependent on concept 18b, when dependent on concept 19, it is dependent on concept 19b, when dependent on concept 20, it is dependent on concept 20b, and when dependent on concept 22, it is dependent on concept 22b), comprising a or said V_{L} domain, which V_{L} domain comprises the CDRL2 sequence of SEQ ID NO:63 or 66, or the CDRL2 sequence of SEQ ID NO:63 or 66 comprising one amino acid substitution.

[0483] Concept 23c: An antibody or a fragment thereof according to any preceding concept (but when dependent on concept 9, it is dependent on concept 9c, when dependent on concept 13, it is dependent on concept 13c, when dependent on concept 16, it is dependent on concept 16c, when dependent on concept 17, it is dependent on concept 17c, when dependent on concept 18, it is dependent on concept 18c, when dependent on concept 19, it is dependent on concept 19c, when dependent on concept 20, it is dependent on concept 20c, and when dependent on concept 22, it is dependent on concept 22c), comprising a or said V_{L} domain, which V_{L} domain comprises the CDRL2 sequence of SEQ ID NO:83 or 86, or the CDRL2 sequence of SEQ ID NO:83 or 86 comprising one amino acid substitution.

[0484] Concept 23d: An antibody or a fragment thereof according to any preceding concept (but when dependent on concept 9, it is dependent on concept 9d, when dependent on concept 13, it is dependent on concept 13d, when dependent on concept 16, it is dependent on concept 16d, when dependent on concept 17, it is dependent on concept 17d, when dependent on concept 18, it is dependent on concept 18d, when dependent on concept 19, it is dependent on concept 19d, when dependent on concept 20, it is dependent on concept 20d, and when dependent on concept 22, it is dependent on concept 22d), comprising a or said V_{L} domain, which V_{L} domain comprises the CDRL2 sequence of SEQ ID NO:103 or 106, or the CDRL2 sequence of SEQ ID NO:103 or 106 comprising one amino acid substitution.

[0485] Concept 23e: An antibody or a fragment thereof according to any preceding concept (but when dependent on concept 9, it is dependent on concept 9e, when dependent on concept 13, it is dependent on concept 13e, when dependent on concept 16, it is dependent on concept 16e, when dependent on concept 17, it is dependent on concept 17e, when dependent on concept 18, it is dependent on concept 18e, when dependent on concept 19, it is dependent on concept 19e, when dependent on concept 20, it is dependent on concept 20e, and when dependent on concept 22, it is dependent on concept 22e), comprising a or said V_{L} domain, which V_{L} domain comprises the CDRL2 sequence of SEQ ID NO:123 or 126, or the CDRL2 sequence of SEQ ID NO:123 or 126 comprising one amino acid substitution.

[0486] Concept 23f: An antibody or a fragment thereof according to any preceding concept (but when dependent on concept 9, it is dependent on concept 9f, when dependent on concept 13, it is dependent on concept 13f, when dependent on concept 16, it is dependent on concept 16f, when dependent on concept 17, it is dependent on concept 17f, when dependent on concept 18, it is dependent on concept 18f, when dependent on concept 19, it is dependent on concept 19f, when dependent on concept 20, it is dependent on concept 20f, and when dependent on concept 22, it is dependent on concept 22f), comprising a or said V_{L} domain, which V_{L} domain comprises the CDRL2 sequence of SEQ ID NO:153 or 156, or the CDRL2 sequence of SEQ ID NO:153 or 156 comprising one amino acid substitution.

[0487] Concept 23g: An antibody or a fragment thereof according to any preceding concept (but when dependent on concept 9, it is dependent on concept 9g, when dependent on concept 13, it is dependent on concept 13g, when dependent on concept 16, it is dependent on concept 16g, when dependent on concept 17, it is dependent on concept 17g, when dependent on concept 18, it is dependent on concept 18g, when dependent on concept 19, it is dependent on concept 19g, when dependent on concept 20, it is dependent on concept 20g, and when dependent on concept 22, it is dependent on concept 22g), comprising a or said V_{L} domain, which V_{L} domain comprises the CDRL2 sequence of SEQ ID NO:183 or 186, or the CDRL2 sequence of SEQ ID NO:183 or 186 comprising one amino acid substitution.

[0488] Concept 23h: An antibody or a fragment thereof according to any preceding concept (but when dependent on concept 9, it is dependent on concept 9h, when dependent on concept 13, it is dependent on concept 13h, when dependent on concept 16, it is dependent on concept 16h, when dependent on concept 17, it is dependent on concept 17h, when dependent on concept 18, it is dependent on concept 18h, when dependent on concept 19, it is dependent on concept 19h, when dependent on concept 20, it is dependent on concept 20h, and when dependent on concept 22, it is dependent on concept 22h), comprising a or said V_{L} domain, which V_{L} domain comprises the CDRL2 sequence of SEQ ID NO:143 or 146, or the CDRL2 sequence of SEQ ID NO:143 or 146 comprising one amino acid substitution.

[0489] Concept 23i: An antibody or a fragment thereof according to any preceding concept (but when dependent on concept 9, it is dependent on concept 9i, when dependent on concept 13, it is dependent on concept 13i, when dependent on concept 16, it is dependent on concept 16i, when dependent on concept 17, it is dependent on concept 17i, when dependent on concept 18, it is dependent on concept 18i, when dependent on concept 19, it is dependent on concept 19i, when dependent on concept 20, it is dependent on concept 20i, and when dependent on concept 22, it is dependent on concept 22i), comprising a or said V_{L} domain, which V_{L} domain comprises the CDRL2 sequence of SEQ ID NO:249 or 252, or the CDRL2 sequence of SEQ ID NO:249 or 252 comprising one amino acid substitution.

[0490] Concept 23j: An antibody or a fragment thereof according to any preceding concept (but when dependent on concept 9, it is dependent on concept 9j, when dependent on concept 13, it is dependent on concept 13j, when dependent on concept 16, it is dependent on concept 16j, when dependent on concept 17, it is dependent on concept 17j, when dependent on concept 18, it is dependent on concept 18j, when dependent on concept 19, it is dependent on concept 19j, when dependent on concept 20, it is dependent on concept 20j, and when dependent on concept 22, it is dependent on concept 22j), comprising a or said V_{L} domain, which V_{L} domain comprises the CDRL2 sequence of SEQ ID NO:269 or 272, or the CDRL2 sequence of SEQ ID NO:269 or 272 comprising one amino acid substitution.

[0491] Concept 23k: An antibody or a fragment thereof according to any preceding concept (but when dependent on concept 9, it is dependent on concept 9k, when dependent on concept 13, it is dependent on concept 13k, when dependent on concept 16, it is dependent on concept 16k, when dependent on concept 17, it is dependent on concept 17k, when dependent on concept 18, it is dependent on concept 18k, when dependent on concept 19, it is dependent on concept 19k, when dependent on concept 20, it is dependent on concept 20k, and when dependent on concept 22, it is dependent on concept 22k), comprising a or said V_{L} domain, which V_{L} domain comprises the CDRL2 sequence of SEQ ID NO:289 or 292, or the CDRL2 sequence of SEQ ID NO:289 or 292 comprising one amino acid substitution.

[0492] Concept 231: An antibody or a fragment thereof according to any preceding concept (but when dependent on concept 9, it is dependent on concept 9l, when dependent on concept 13, it is dependent on concept 13l, when dependent on concept 16, it is dependent on concept 16l, when dependent on concept 17, it is dependent on concept 17l, when dependent on concept 18, it is dependent on concept 18l, when dependent on concept 19, it is dependent on concept 19l, when dependent on concept 20, it is dependent on concept 20l, and when dependent on concept 22, it is dependent on concept 22l), comprising a or said V_{L} domain, which V_{L} domain comprises the CDRL2 sequence of SEQ ID NO:354 or 357, or the CDRL2 sequence of SEQ ID NO:354 or 357 comprising one amino acid substitution.

Concept 24. The antibody or fragment according to any preceding concept, comprising a or said V_{L} domain, which V_{L} domain comprises the CDRL3 sequence of SEQ ID NO:39 or 42, or the CRDL3 sequence of SEQ ID NO:39 or 42 comprising 4 or fewer amino acid substitutions.

[0493] Concept 24a: An antibody or a fragment thereof according to any preceding concept (but when dependent on concept 9, it is dependent on concept 9a, when dependent on concept 13, it is dependent on concept 13a, when dependent on concept 16, it is dependent on concept 16a, when dependent on concept 17, it is dependent on concept 17a, when dependent on concept 18, it is dependent on concept 18a, when dependent on concept 19, it is dependent on concept 19a, when dependent on concept 20, it is dependent on concept 20a, when dependent on concept 22, it is dependent on concept 22a, and when dependent on concept 23, it is dependent on concept 23a), comprising a or said V_{L} domain, which V_{L} domain comprises the CDRL3 sequence of SEQ ID NO:19 or 22, or the CDRL3 sequence of SEQ ID NO: 19 or 22 comprising 4 or fewer amino acid substitutions.

[0494] Concept 24b: An antibody or a fragment thereof according to any preceding concept (but when dependent on concept 9, it is dependent on concept 9b, when dependent on concept 13, it is dependent on concept 13b, when dependent on concept 16, it is dependent on concept 16b, when dependent on concept 17, it is dependent on concept 17b, when dependent on concept 18, it is dependent on concept 18b, when dependent on concept 19, it is dependent on concept 19b, when dependent on concept 20, it is dependent on concept 20b, when dependent on concept 22, it is dependent on concept 22b, and when dependent on concept 23, it is dependent on concept 23b), comprising a or said V_{L} domain, which V_{L} domain comprises the CDRL3 sequence of SEQ ID NO:64 or 67, or the CDRL3 sequence of SEQ ID NO:64 or 67 comprising 4 or fewer amino acid substitutions.

[0495] Concept 24c: An antibody or a fragment thereof according to any preceding concept (but when dependent on concept 9, it is dependent on concept 9c, when dependent on concept 13, it is dependent on concept 13c, when dependent on concept 16, it is dependent on concept 16c, when dependent on concept 17, it is dependent on concept 17c, when dependent on concept 18, it is dependent on concept 18c, when dependent on concept 19, it is dependent on concept 19c, when dependent on concept 20, it is dependent on concept 20c, when dependent on concept 22, it is dependent on concept 22c, and when dependent on concept 23, it is dependent on concept 23c), comprising a or said V_{L} domain, which V_{L} domain comprises the CDRL3 sequence of SEQ ID NO:84 or 87, or the CDRL3 sequence of SEQ ID NO:84 or 87 comprising 4 or fewer amino acid substitutions.

[0496] Concept 24d: An antibody or a fragment thereof according to any preceding concept (but when dependent on concept 9, it is dependent on concept 9d, when dependent on concept 13, it is dependent on concept 13d, when dependent on concept 16, it is dependent on concept 16d, when dependent on concept 17, it is dependent on concept 17d, when dependent on concept 18, it is dependent on concept 18d, when dependent on concept 19, it is dependent on concept 19d, when dependent on concept 20, it is dependent on concept 20d, when dependent on concept 22, it is dependent on concept 22d, and when dependent on concept 23, it is dependent on concept 23d), comprising a or said V_{L} domain, which V_{L} domain comprises the CDRL3 sequence of SEQ ID NO:104 or 107, or the CDRL3 sequence of SEQ ID NO:104 or 107 comprising 4 or fewer amino acid substitutions.

[0497] Concept 24e: An antibody or a fragment thereof according to any preceding concept (but when dependent on concept 9, it is dependent on concept 9e, when dependent on concept 13, it is dependent on concept 13e, when dependent on concept 16, it is dependent on concept 16e, when dependent on concept 17, it is dependent on concept 17e, when dependent on concept 18, it is dependent on concept 18e, when dependent on concept 19, it is dependent on concept 19e, when dependent on concept 20, it is dependent on concept 20e, when dependent on concept 22, it is dependent on concept 22e, and when dependent on concept 23, it is dependent on concept 23e), comprising a or said V_{L} domain, which V_{L} domain comprises the CDRL3 sequence of SEQ ID NO:124 or 127, or the CDRL3 sequence of SEQ ID NO:124 or 127 comprising 4 or fewer amino acid substitutions.

[0498] Concept 24f: An antibody or a fragment thereof according to any preceding concept (but when dependent on concept 9, it is dependent on concept 9f, when dependent on concept 13, it is dependent on concept 13f, when dependent on concept 16, it is dependent on concept 16f, when dependent on concept 17, it is dependent on concept 17f, when dependent on concept 18, it is dependent on concept 18f, when dependent on concept 19, it is dependent on concept 19f, when dependent on concept 20, it is dependent on concept 20f, when dependent on concept 22, it is dependent on concept 22f, and when dependent on concept 23, it is dependent on concept 23f), comprising a or said V_{L} domain, which V_{L} domain comprises the CDRL3 sequence of SEQ ID NO:164 or 167, or the CDRL3 sequence of SEQ ID NO:164 or 167 comprising 4 or fewer amino acid substitutions.

[0499] Concept 24g: An antibody or a fragment thereof according to any preceding concept (but when dependent on concept 9, it is dependent on concept 9g, when dependent on concept 13, it is dependent on concept 13g, when dependent on concept 16, it is dependent on concept 16g, when dependent on concept 17, it is dependent on concept 17g, when dependent on concept 18, it is dependent on concept 18g, when dependent on concept 19, it is dependent on concept 19g, when dependent on concept 20, it is dependent on concept 20g, when dependent on concept 22, it is dependent on concept 22g, and when dependent on concept 23, it is dependent on concept 23g), comprising a or said V_{L} domain, which V_{L} domain comprises the CDRL3 sequence of SEQ ID NO:184 or 187, or the CDRL3 sequence of SEQ ID NO:184 or 187 comprising 4 or fewer amino acid substitutions.

[0500] Concept 24h: An antibody or a fragment thereof according to any preceding concept (but when dependent on concept 9, it is dependent on concept 9h, when dependent on concept 13, it is dependent on concept 13h, when dependent on concept 16, it is dependent on concept 16h, when dependent on concept 17, it is dependent on concept 17h, when dependent on concept 18, it is dependent on concept 18h, when dependent on concept 19, it is dependent on concept 19h, when dependent on concept 20, it is dependent on concept 20h, when dependent on concept 22, it is dependent on concept 22h, and when dependent on concept 23, it is dependent on concept 23h), comprising a or said V_{L} domain, which V_{L} domain comprises the CDRL3 sequence of SEQ ID NO:144 or 147, or the CDRL3 sequence of SEQ ID NO:144 or 147 comprising 4 or fewer amino acid substitutions.

[0501] Concept 24i: An antibody or a fragment thereof according to any preceding concept (but when dependent on concept 9, it is dependent on concept 9i, when dependent on concept 13, it is dependent on concept 13i, when dependent on concept 16, it is dependent on concept 16i, when dependent on concept 17, it is dependent on concept 17i, when dependent on concept 18, it is dependent on concept 18i, when dependent on concept 19, it is dependent on concept 19i, when dependent on concept 20, it is dependent on concept 20i, when dependent on concept 22, it is dependent on concept 22i, and when dependent on concept 23, it is dependent on concept 23i), comprising a or said V_{L} domain, which V_{L} domain comprises the CDRL3 sequence of SEQ ID NO:250 or 253, or the CDRL3 sequence of SEQ ID NO:250 or 253 comprising 4 or fewer amino acid substitutions.

[0502] Concept 24j: An antibody or a fragment thereof according to any preceding concept (but when dependent on concept 9, it is dependent on concept 9j, when dependent on concept 13, it is dependent on concept 13j, when dependent on concept 16, it is dependent on concept 16j, when dependent on concept 17, it is dependent on concept 17j, when dependent on concept 18, it is dependent on concept 183, when dependent on concept 19, it is dependent on concept 19j, when dependent on concept 20, it is dependent on concept 20j, when dependent on concept 22, it is dependent on concept 22j, and when dependent on concept 23, it is dependent on concept 23j), comprising a or said V_{L} domain, which V_{L} domain comprises the CDRL3 sequence of SEQ ID NO:270 or 273, or the CDRL3 sequence of SEQ ID NO:270 or 273 comprising 4 or fewer amino acid substitutions.

[0503] Concept 24k: An antibody or a fragment thereof according to any preceding concept (but when dependent on concept 9, it is dependent on concept 9k, when dependent on concept 13, it is dependent on concept 13k, when dependent on concept 16, it is dependent on concept 16k, when dependent on concept 17, it is dependent on concept 17k, when dependent on concept 18, it is dependent on concept 18k, when dependent on concept 19, it is dependent on concept 19k, when dependent on concept 20, it is dependent on concept 20k, when dependent on concept 22, it is dependent on concept 22k, and when dependent on concept 23, it is dependent on concept 23k), comprising a or said V_{L} domain, which V_{L} domain comprises the CDRL3 sequence of SEQ ID NO:290 or 293, or the CDRL3 sequence of SEQ ID NO:290 or 293 comprising 4 or fewer amino acid substitutions.

[0504] Concept 24l: An antibody or a fragment thereof according to any preceding concept (but when dependent on concept 9, it is dependent on concept 9l, when dependent on concept 13, it is dependent on concept 13l, when dependent on concept 16, it is dependent on concept 16l, when dependent on concept 17, it is dependent on concept 17l, when dependent on concept 18, it is dependent on concept 18l, when dependent on concept 19, it is dependent on concept 19l, when dependent on concept 20, it is dependent on concept 20l, when dependent on concept 22, it is dependent on concept 22l, and when dependent on concept 23, it is dependent on concept 23l), comprising a or said V_{L} domain, which V_{L} domain comprises the CDRL3 sequence of SEQ ID NO:355 or 358, or the CDRL3 sequence of SEQ ID NO:355 or 358 comprising 4 or fewer amino acid substitutions.

Concept 25. The antibody or fragment according to any preceding concept, comprising a or said V_{L} domain, which V_{L} domain comprises an amino acid sequence of SEQ ID NO:43, or a light chain variable domain amino acid sequence that is at least 80% (e.g. at least 85%, or at least 90%) identical to SEQ ID NO:43 (for example the V_{L} domain sequence in the light chain sequence of Seq ID No:50, 51 or 298).

[0505] Concept 25a: An antibody or a fragment thereof according to any preceding concept (but when dependent on concept 9, it is dependent on concept 9a, when dependent on concept 13, it is dependent on concept 13a, when dependent on concept 16, it is dependent on concept 16a, when dependent on concept 17, it is dependent on concept 17a, when dependent on concept 18, it is dependent on concept 18a, when dependent on concept 19, it is dependent on concept 19a, when dependent on concept 20, it is dependent on concept 20a, when dependent on concept 22, it is dependent on concept 22a, when dependent on concept 23, it is dependent on concept 23a, and when dependent on concept 24, it is dependent on concept 24a), wherein the V_{L} domain comprises an amino acid sequence of SEQ ID NO:23, or a light chain variable domain amino acid sequence that is at least 80% (e.g. at least 85%, or at least 90%) identical to SEQ ID NO:23.

[0506] Concept 25b: An antibody or a fragment thereof according to any preceding concept (but when dependent on concept 9, it is dependent on concept 9b, when dependent on concept 13, it is dependent on concept 13b, when dependent on concept 16, it is dependent on concept 16b, when dependent on concept 17, it is dependent on concept 17b, when dependent on concept 18, it is dependent on concept 18b, when dependent on concept 19, it is dependent on concept 19b, when dependent on concept 20, it is dependent on concept 20b, when dependent on concept 22, it is dependent on concept 22a, when dependent on concept 23, it is dependent on concept 23b, and when dependent on concept 24, it is dependent on concept 24b), wherein the V_{L} domain comprises an amino acid sequence of SEQ ID NO:68, or a light chain variable domain amino acid sequence that is at least 80% (e.g. at least 85%, or at least 90%) identical to SEQ ID NO:68.

[0507] Concept 25c: An antibody or a fragment thereof according to any preceding concept (but when dependent on concept 9, it is dependent on concept 9c, when dependent on concept 13, it is dependent on concept 13c, when dependent on concept 16, it is dependent on concept 16c, when dependent on concept 17, it is dependent on concept 17c, when dependent on concept 18, it is dependent on concept 18c, when dependent on concept 19, it is dependent on concept 19c, when dependent on concept 20, it is dependent on concept 20c, when dependent on concept 22, it is dependent on concept 22c, when dependent on concept 23, it is dependent on concept 23c, and when dependent on concept 24, it is dependent on concept 24c), wherein the V_{L} domain comprises an amino acid sequence of SEQ ID NO:88, or a light chain variable domain amino acid sequence that is at least 80% (e.g. at least 85%, or at least 90%) identical to SEQ ID NO:88.

[0508] Concept 25d: An antibody or a fragment thereof according to any preceding concept (but when dependent on concept 9, it is dependent on concept 9d, when dependent on concept 13, it is dependent on concept 13d, when dependent on concept 16, it is dependent on concept 16d, when dependent on concept 17, it is dependent on concept 17d, when dependent on concept 18, it is dependent on concept 18d, when dependent on concept 19, it is dependent on concept 19d, when dependent on concept 20, it is dependent on concept 20d, when dependent on concept 22, it is dependent on concept 22d, when dependent on concept 23, it is dependent on concept 23d, and when dependent on concept 24, it is dependent on concept 24d), wherein the V_{L} domain comprises an amino acid sequence of SEQ ID NO:108, or a light chain variable domain amino acid sequence that is at least 80% (e.g. at least 85%, or at least 90%) identical to SEQ ID NO:108.

[0509] Concept 25e: An antibody or a fragment thereof according to any preceding concept (but when dependent on concept 9, it is dependent on concept 9e, when dependent on concept 13, it is dependent on concept 13e, when dependent on concept 16, it is dependent on concept 16e, when dependent on concept 17, it is dependent on concept 17e, when dependent on concept 18, it is dependent on concept 18e, when dependent on concept 19, it is dependent on concept 19e, when dependent on concept 20, it is dependent on concept 20e, when dependent on concept 22, it is dependent on concept 22e, when dependent on concept 23, it is dependent on concept 23e, and when dependent on concept 24, it is dependent on concept 24e), wherein the V_{L} domain comprises an amino acid sequence of SEQ ID NO:128, or a light chain variable domain amino acid sequence that is at least 80% (e.g. at least 85%, or at least 90%) identical to SEQ ID NO:128.

[0510] Concept 25f: An antibody or a fragment thereof according to any preceding concept (but when dependent on concept 9, it is dependent on concept 9f, when dependent on concept 13, it is dependent on concept 13f, when dependent on concept 16, it is dependent on concept 16f, when dependent on concept 17, it is dependent on concept 17f, when dependent on concept 18, it is dependent on concept 18f, when dependent on concept 19, it is dependent on concept 19f, when dependent on concept 20, it is dependent on concept 20f, when dependent on concept 22, it is dependent on concept 22f, when dependent on concept 23, it is dependent on concept 23f, and when dependent on concept 24, it is dependent on concept 24f), wherein the V_{L} domain comprises an amino acid sequence of SEQ ID NO:168, or a light chain variable domain amino acid sequence that is at least 80% (e.g. at least 85%, or at least 90%) identical to SEQ ID NO:168.

[0511] Concept 25g: An antibody or a fragment thereof according to any preceding concept (but when dependent on concept 9, it is dependent on concept 9g, when dependent on concept 13, it is dependent on concept 13g, when dependent on concept 16, it is dependent on concept 16g, when dependent on concept 17, it is dependent on concept 17g, when dependent on concept 18, it is dependent on concept 18g, when dependent on concept 19, it is dependent on concept 19g, when dependent on concept 20, it is dependent on concept 20g, when dependent on concept 22, it is dependent on concept 22g, when dependent on concept 23, it is dependent on concept 23g, and when dependent on concept 24, it is dependent on concept 24g), wherein the V_{L} domain comprises an amino acid sequence of SEQ ID NO:188, or a light chain variable domain amino acid sequence that is at least 80% (e.g. at least 85%, or at least 90%) identical to SEQ ID NO:188.

[0512] Concept 25h: An antibody or a fragment thereof according to any preceding concept (but when dependent on concept 9, it is dependent on concept 9h, when dependent on concept 13, it is dependent on concept 13h, when dependent on concept 16, it is dependent on concept 16h, when dependent on concept 17, it is dependent on concept 17h, when dependent on concept 18, it is dependent on concept 18h, when dependent on concept 19, it is dependent on concept 19h, when dependent on concept 20, it is dependent on concept 20h, when dependent on concept 22, it is dependent on concept 22h, when dependent on concept 23, it is dependent on concept 23h, and when dependent on concept 24, it is dependent on concept 24h), wherein the V_{L} domain comprises an amino acid sequence of SEQ ID NO:148, or a light chain variable domain amino acid sequence that is at least 80% (e.g. at least 85%, or at least 90%) identical to SEQ ID NO:148.

[0513] Concept 25i: An antibody or a fragment thereof according to any preceding concept (but when dependent on concept 9, it is dependent on concept 9i, when dependent on concept 13, it is dependent on concept 13i, when dependent on concept 16, it is dependent on concept 16i, when dependent on concept 17, it is dependent on concept 17i, when dependent on concept 18, it is dependent on concept 18i, when dependent on concept 19, it is dependent on concept 19i, when dependent on concept 20, it is dependent on concept 20i, when dependent on concept 22, it is dependent on concept 22i, when dependent on concept 23, it is dependent on concept 23i, and when dependent on concept 24, it is dependent on concept 24i), wherein the V_{L} domain comprises an amino acid sequence of SEQ ID NO:254, or a light chain variable domain amino acid sequence that is at least 80% (e.g. at least 85%, or at least 90%) identical to SEQ ID NO:254.

[0514] Concept 25j: An antibody or a fragment thereof according to any preceding concept (but when dependent on concept 9, it is dependent on concept 9j, when dependent on concept 13, it is dependent on concept 13j, when dependent on concept 16, it is dependent on concept 16j, when dependent on concept 17, it is dependent on concept 17j, when dependent on concept 18, it is dependent on concept 18j, when dependent on concept 19, it is dependent on concept 19j, when dependent on concept 20, it is dependent on concept 20j, when dependent on concept 22, it is dependent on concept 22j, when dependent on concept 23, it is dependent on concept 23j, and when dependent on concept 24, it is dependent on concept 24j), wherein the V_{L} domain comprises an amino acid sequence of SEQ ID NO:274, or a light chain variable domain amino acid sequence that is at least 80% (e.g. at least 85%, or at least 90%) identical to SEQ ID NO:274.

[0515] Concept 25k: An antibody or a fragment thereof according to any preceding concept (but when dependent on concept 9, it is dependent on concept 9k, when dependent on concept 13, it is dependent on concept 13k, when dependent on concept 16, it is dependent on concept 16k, when dependent on concept 17, it is dependent on concept 17k, when dependent on concept 18, it is dependent on concept 18k, when dependent on concept 19, it is dependent on concept 19k, when dependent on concept 20, it is dependent on concept 20k, when dependent on concept 22, it is dependent on concept 22k, when dependent on concept 23, it is dependent on concept 23k, and when dependent on concept 24, it is dependent on concept 24k), wherein the V_{L} domain comprises an amino acid sequence of SEQ ID NO:294, or a light chain variable domain amino acid sequence that is at least 80% (e.g. at least 85%, or at least 90%) identical to SEQ ID NO:294.

[0516] Concept 25l: An antibody or a fragment thereof according to any preceding concept (but when dependent on concept 9, it is dependent on concept 9l, when dependent on concept 13, it is dependent on concept 13l, when dependent on concept 16, it is dependent on concept 16l, when dependent on concept 17, it is dependent on concept 17l, when dependent on concept 18, it is dependent on concept 18l, when dependent on concept 19, it is dependent on concept 19l, when dependent on concept 20, it is dependent on concept 20l, when dependent on concept 22, it is dependent on concept 22l, when dependent on concept 23, it is dependent on concept 23l, and when dependent on concept 24, it is dependent on concept 24l), wherein the V_{L} domain comprises an amino acid sequence of SEQ ID NO:359, or a light chain variable domain amino acid sequence that is at least 80% (e.g. at least 85%, or at least 90%) identical to SEQ ID NO:359.

[0517] In one embodiment, the amino acid sequence is at least 70% identical to the specified Seq ID No. In one embodiment, the amino acid sequence is at least 75% identical to the specified Seq ID No. In one embodiment, the amino acid sequence is at least 95% identical to the specified Seq ID No. In one embodiment, the amino acid sequence is at least 96% identical to the specified Seq ID No. In one embodiment, the amino acid sequence is at least 97% identical to the specified Seq ID No. In one embodiment, the amino acid sequence is at least 98% identical to the specified Seq ID No. In one embodiment, the amino acid sequence is at least 99% identical to the specified Seq ID No. In one embodiment, the amino acid sequence is at least 99.5% identical to the specified Seq ID No.

Concept 26. The antibody or fragment according to any one of concepts 12 to 21, comprising first and second copies of a or said V_{L} domain.
Concept 27. The antibody or fragment according to any preceding concept which specifically binds to cynomolgus PD-L1 as defined by Seq ID No:2.

[0518] In one embodiment, the antibody or fragment binds to cynomolgus PD-L1 with an affinity of less than 1 nM (e.g. from 1 nM to 0.01 pM or from 1 nM to 0.1 pM, or from 1 nM to 1 pM). In one embodiment, the antibody or fragment binds to cynomolgus PD-L1 with an affinity of less than 10 nM (e.g. from 10 nM to 0.01 pM or from 10 nM to 0.1 pM, or from 10 nM to 1 pM). In one embodiment, the antibody or fragment binds to cynomolgus PD-L1 with an affinity of less than 0.1 nM (e.g. from 0.1 nM to 0.01 pM or from 0.1 nM to 0.1 pM, or from 0.1 nM to 1 pM). In one embodiment, the antibody or fragment binds to cynomolgus PD-L1 with an affinity of less than 0.01 nM (e.g. from 0.011 nM to 0.01 pM or from 0.01 nM to 0.1 pM).

[0519] In one embodiment, the antibody or fragment binds to cynomolgus PD-L1 with an affinity of within 2-fold of the affinity to hPD-L1. In one embodiment, the antibody or fragment binds to cynomolgus PD-L1 with an affinity of within 4-fold of the affinity to hPD-L1. In one embodiment, the antibody or fragment binds to cynomolgus PD-L1 with an affinity of within 5-fold of the affinity to hPD-L1. In one embodiment, the antibody or fragment binds to cynomolgus PD-L1 with an affinity of within 6-fold of the affinity to hPD-L1. In one embodiment, the antibody or fragment binds to cynomolgus PD-L1 with an affinity of within 8-fold of the affinity to hPD-L1. In one embodiment, the antibody or fragment binds to cynomolgus PD-L1 with an affinity of within 10-fold of the affinity to hPD-L1.

[0520] In one embodiment, the antibody or fragment does not detectably bind to cynomolgus PD-L1. In one embodiment, the antibody or fragment does not detectably bind to murine PD-L1.

[0521] In one embodiment, the antibody or fragment binds to murine PD-L1 with an affinity of less than 1 nM (e.g. from 1 nM to 0.01 pM or from 1 nM to 0.1 pM, or from 1 nM to 1 pM). In one embodiment, the antibody or fragment binds to murine PD-L1 with an affinity of less than 10 nM (e.g. from 10 nM to 0.01 pM or from 10 nM to 0.1 pM, or from 10 nM to 1 pM). In one embodiment, the antibody or fragment binds to murine PD-L1 with an affinity of less than 0.1 nM (e.g. from 0.1 nM to 0.01 pM or from 0.1 nM to 0.1 pM, or from 0.1 nM to 1 pM). In one embodiment, the antibody or fragment binds to murine PD-L1 with an affinity of less than 0.01 nM (e.g. from 0.011 nM to 0.01 pM or from 0.01 nM to 0.1 pM).

Concept 28. The antibody or fragment according to any preceding concept, wherein the antibody or fragment comprises a kappa light chain.

[0522] Kappa light chain constant region amino acid and nucleotide sequences can be found in Seq ID Nos:206 to 215.

[0523] In one embodiment, the light chain may be a lambda light chain. Lambda light chain constant region amino acid and nucleotide sequences can be found in Seq ID Nos:216 to 237 and Seq ID No:535, Seq ID No:536 and Seq ID No:538.

Concept 29. The antibody or fragment according to any one of concepts 9 to 28, wherein the amino acid substitutions are conservative amino acid substitutions, optionally wherein the conservative substitutions are from one of six groups (each group containing amino acids that are conservative substitutions for one another) selected from:
[0524] 1) Alanine (A), Serine (S), Threonine (T);
[0525] 2) Aspartic acid (D), Glutamic acid (E);
[0526] 3) Asparagine (N), Glutamine (Q);
[0527] 4) Arginine (R), Lysine (K);
[0528] 5) Isoleucine (I), Leucine (L), Methionine (M), Valine (V); and
[0529] 6) Phenylalanine (F), Tyrosine (Y), Tryptophan (W).

[0530] Conservative substitutions may be as described above in concept 9.

Concept 30. The antibody or fragment according to any preceding concept, wherein the antibody or fragment comprises a constant region, such as a human constant region, for example an effector-null human constant region, e.g. an IgG4 constant region or an IgG1 constant region, optionally wherein the constant region is IgG4-PE (Seq ID No:199), or a disabled IgG1 as defined in Seq ID No:205.

[0531] In other embodiments, the antibody or fragment is any of the isotypes or constant regions as defined hereinabove. In one embodiment, the constant region is wild-type human IgG1 (Seq ID No:340). For example, the constant region is an effector-enabled IgG1 constant region, optionally having ADCC and/or CDC activity. In one embodiment, the constant region is engineered for enhanced ADCC and/or CDC and/or ADCP. In another embodiment, the constant region is engineered for enhanced effector function.

[0532] The IgG4 constant region may be any of the IgG4 constant region amino acid sequences, or encoded by any of the nucleic acid sequences of Seq ID Nos:192 to 203. A heavy chain constant region may be an IgG4 comprising both the Leu235Glu mutation and the Ser228Pro mutation. This “IgG4-PE” heavy chain constant region (Seq ID Nos:199, encoded by Seq ID Nos:198, 200 and 201) is effector null.

[0533] An alternative effector null human constant region is a disabled IgG1 being an IgG1*01 allele comprising the L235A and/or G237A mutations (e.g. LAGA, Seq ID No:205, encoded by Seq ID No:204). In one embodiment, the antibodies or antibody fragments disclosed herein comprise an IgG1 heavy chain constant region, wherein the sequence contains alanine at position 235 and/or 237 (EU index numbering).

[0534] The antibody-dependent cell phagocytosis (ADCP) mechanism is discussed in ail et al., “Antibody-Dependent Phagocytosis of Tumor Cells by Macrophages: A Potent Effector Mechanism of Monoclonal Antibody Therapy of Cancer”, Cancer Res., 75(23), Dec. 1, 2015.

[0535] The potency of Fc-mediated effects may be enhanced by engineering the Fc domain by various established techniques. Such methods increase the affinity for certain Fc-receptors, thus creating potential diverse profiles of activation enhancement. This can be achieved by modification of one or several amino acid residues (e.g. as described in Lazar et al., 2006, Proc. Natl. Acad. Sci. U.S.A., March 14; 103(11):4005-10; the modifications disclosed therein are incorporated herein by reference). Human IgG1 constant regions containing specific mutations or altered glycosylation on residue Asn297 (e.g. N297Q, EU index numbering) have been shown to enhance binding to Fc receptors. In one embodiment, such mutations are one or more of the residues selected from 239, 332 and 330 for human IgG1 constant regions (or the equivalent positions in other IgG isotypes). In one embodiment, the antibody or fragment comprises a human IgG1 constant region having one or more mutations independently selected from N297Q, S239D, I332E and A330L (EU index numbering).

[0536] In another embodiment, the increase in affinity for Fc-receptors is achieved by altering the natural glycosylation profile of the Fc domain by, for example, generating under fucosylated or de-fucosylated variants (as described in Natsume et al., 2009, Drug Des. Devel. Ther., 3:7-16 or by Zhou Q., Biotechnol. Bioeng., 2008, Feb. 15, 99(3):652-65, the modifications described therein are incorporated herein by reference). Non-fucosylated antibodies harbour a tri-mannosyl core structure of complex-type N-glycans of Fc without fucose residue. These glycoengineered antibodies that lack core fucose residue from the Fc N-glycans may exhibit stronger ADCC than fucosylated equivalents due to enhancement of FcγRIIIa binding capacity. For example, to increase ADCC, residues in the hinge region can be altered to increase binding to Fc-γRIII (see, for example, Shields et al., 2001, J. Biol. Chem., March 2; 276(9):6591-604; the modifications described therein are incorporated herein by reference). Thus, in one embodiment, the antibody or fragment comprises a human IgG heavy chain constant region that is a variant of a wild-type human IgG heavy chain constant region, wherein the variant human IgG heavy chain constant region binds to human Fcγ receptors selected from the group consisting of FcγRIIB and FcγRIIA with higher affinity than the wild type human IgG heavy chain constant region binds to the human Fcγ receptors. In one embodiment, the antibody or fragment comprises a human IgG heavy chain constant region that is a variant of a wild type human IgG heavy chain constant region, wherein the variant human IgG heavy chain constant region binds to human FcγRIIB with higher affinity than the wild type human IgG heavy chain constant region binds to human FcγRIIB. In one embodiment, the variant human IgG heavy chain constant region is a variant human IgG1, a variant human IgG2, or a variant human IgG4 heavy chain constant region. In one embodiment, the variant human IgG heavy chain constant region comprises one or more amino acid mutations selected from G236D, P238D, S239D, S267E, L328F, and L328E (EU index numbering system). In another embodiment, the variant human IgG heavy chain constant region comprises a set of amino acid mutations selected from the group consisting of: S267E and L328F; P238D and L328E; P238D and one or more substitutions selected from the group consisting of E233D, G237D, H268D, P271G, and A330R; P238D, E233D, G237D, H268D, P271G, and A330R; G236D and S267E; S239D and S267E; V262E, S267E, and L328F; and V264E, S267E, and L328F (EU index numbering system). In another embodiment, the variant human IgG heavy chain constant region further comprises one or more amino acid mutations that reduce the affinity of the IgG for human FcγRIIIA, human FcγRIIA, or human FcγRI. In one embodiments, the FcγRIIB is expressed on a cell selected from the group consisting of macrophages, monocytes, B-cells, dendritic cells, endothelial cells, and activated T-cells. In one embodiment, the variant human IgG heavy chain constant region comprises one or more of the following amino acid mutations G236A, S239D, F243L, T256A, K290A, R292P, S298A, Y300L, V305I, A330L, I332E, E333A, K334A, A339T, and P396L (EU index numbering system). In one embodiment, the variant human IgG heavy chain constant region comprises a set of amino acid mutations selected from the group consisting of: S239D; T256A; K290A; S298A; I332E; E333A; K334A; A339T; S239D and I332E; S239D, A330L, and I332E; S298A, E333A, and K334A; G236A, S239D, and I332E; and F243L, R292P, Y300L, V305I, and P396L (EU index numbering system). In one embodiment, the variant human IgG heavy chain constant region comprises a S239D, A330L, or I332E amino acid mutations (EU index numbering system). In one embodiment, the variant human IgG heavy chain constant region comprises an S239D and I332E amino acid mutations (EU index numbering system). In one embodiment, the variant human IgG heavy chain constant region is a variant human IgG1 heavy chain constant region comprising the S239D and I332E amino acid mutations (EU index numbering system). In one embodiment, the antibody or fragment comprises an afucosylated Fc region. In another embodiment, the antibody or fragment thereof is defucosylated. In another embodiment, the antibody or fragment is under fucosylated.

[0537] In another embodiment, the antibodies and fragments disclosed herein may comprise a triple mutation (M252Y/S254T/T256E) which enhances binding to FcRn. See Dall et al, Immunol 2002; 169:5171-5180 for a discussion of mutations affection FcRn binding in table 2, the mutations described therien are incorporated herein by reference.

[0538] Equally, the enhancement of CDC may be achieved by amino acid changes that increase affinity for C1q, the first component of the classic complement activation cascade (see Idusogie et al., J. Immunol., 2001, 166:2571-2575; the modifications described are incorporated herein by reference). Another approach is to create a chimeric Fc domain created from human IgG1 and human IgG3 segments that exploit the higher affinity if IgG3 for C1q (Natsume et al., 2008, Cancer Res., 68: 3863-3872; the modifications are incorporated herein by reference). In another embodiment, the antibody or antibody fragments disclosed herein may comprise mutated amino acids at residues 329, 331 and/or 322 to alter the C1q binding and/or reduced or abolished CDC activity. In another embodiment, the antibodies or antibody fragments disclosed herein may contain Fc regions with modifications at residues 231 and 239, whereby the amino acids are replaced to alter the ability of the antibody to fix complement. In one embodiment, the antibody or fragment has a constant region comprising one or more mutations selected from E345K, E430G, R344D and D356R, in particular a double mutation comprising R344D and D356R (EU index numbering system).

[0539] An antibody may have a heavy chain constant region that binds one or more types of Fc receptor but does not induce cellular effector functions, i.e. which does not mediate ADCC, CDC or ADCP activity. Such a constant region may be unable to bind the particular Fc receptor(s) responsible for triggering ADCC, CDC or ADCP activity. An antibody may have a heavy chain constant region that does not bind Fcγ receptors. Thus, in one embodiment, the constant region may comprise a Leu235Glu mutation (EU index numbering system).

[0540] In another embodiment, the antibodies and fragments disclosed herein are modified to increase or decrease serum half-life. In one embodiment, one or more of the following mutations: T252L, T254S or T256F are introduced to increase biological half-life of the antibody. Biological half-life can also be increased by altering the heavy chain constant region CH₁ domain or CL region to contain a salvage receptor binding epitope taken from two loops of a CH2 domain of an Fc region of an IgG, as described in U.S. Pat. Nos. 5,869,046 and 6,121,022, the modifications described therein are incorporated herein by reference. In another embodiment, the Fc hinge region of an antibody or antigen-binding fragment of the invention is mutated to decrease the biological half-life of the antibody or fragment. One or more amino acid mutations are introduced into the CH2-CH3 domain interface region of the Fc-hinge fragment such that the antibody or fragment has impaired Staphylococcyl protein A (SpA) binding relative to native Fc-hinge domain SpA binding. Other methods of increasing serum half-life are known to those skilled in the art. Thus, in one embodiment, the antibody or fragment is PEGylated. In another embodiment, the antibody or fragment is fused to an albumin-bidnig domain, e.g. an albumin binding single domain antibody (dAb). In another embodiment, the antibody or fragment is PASylated (i.e. genetic fusion of polypeptide sequences composed of PAS (XL-Protein GmbH) which forms uncharged random coil structures with large hydrodynamic volume). In another embodiment, the antibody or fragment is XTENylated®/rPEGylated (i.e. genetic fusion of non-exact repeat peptide sequence (Amunix, Versartis) to the therapeutic peptide). In another embodiment, the antibody or fragment is ELPylated (i.e. genetic fusion to ELP repeat sequence (PhaseBio)). These various half-life extending fusions are described in more detail in Strohi, BioDrugs (2015) 29:215-239, which fusions, e.g. in Tables 2 and 6, are incorporated herein by reference.

[0541] The antibody may have a modified constant region which increases stabililty. Thus, in one embodiment, the heavy chain constant region comprises a Ser228Pro mutation. In another embodiment, the antibodies and fragments disclosed herein comprise a heavy chain hinge region that has been modified to alter the number of cysteine residues. This modification can be used to facilitate assembly of the light and heavy chains or to increase or decrease the stability of the antibody.

Concept 31. The antibody or fragment according to concept 30, wherein the constant region is a murine constant region.

[0542] In other embodiments, the constant region may be of any non-human mammalian origin, e.g. rat, mouse, hamster, guinea pig, dog, cat, horse, chicken, llama, dromedary, etc. In one embodiment, the constant region is a rat constant region. In another embodiment, the constant region is a llama constant region. The murine constant region may be any of the isotypes or alleles described hereinabove.

Concept 32. The antibody or fragment according to concept 30 or concept 31, wherein the constant region has CDC and/or ADCC activity.
Concept 33. The antibody according to any preceding concept wherein the:
[0543] a) V_{H} domain comprises an amino acid sequence of SEQ ID No:33 and the V_{L} domain comprises an amino acid sequence of SEQ ID No:43;
[0544] b) V_{H} domain comprises an amino acid sequence that is at least 85% identical to SEQ ID No:33, and the V_{L} domain comprises an amino acid sequence that is at least 85% identical to SEQ ID No:43;
[0545] c) V_{H} domain comprises an amino acid sequence of the V_{H} domain of SEQ ID No:47 and the V_{L} domain comprises an amino acid sequence of SEQ ID No:43;
[0546] d) V_{H} domain comprises an amino acid sequence of the V_{H} domain of SEQ ID No:48 and the V_{L} domain comprises an amino acid sequence of SEQ ID No:43;
[0547] e) V_{H} domain comprises an amino acid sequence of the V_{H} domain of SEQ ID No:49 and the V_{L} domain comprises an amino acid sequence of SEQ ID No:43;
[0548] f) V_{H} domain comprises an amino acid sequence of the V_{H} domain of SEQ ID No:342 and the V_{L} domain comprises an amino acid sequence of SEQ ID No:43;
[0549] g) V_{H} domain comprises an amino acid sequence of SEQ ID No:33 and the V_{L} domain comprises an amino acid sequence of the V_{L} domain of SEQ ID No:50;
[0550] h) V_{H} domain comprises an amino acid sequence of the V_{H} domain of SEQ ID No:47 and the V_{L} domain comprises an amino acid sequence of the V_{L} domain of SEQ ID No:50;
[0551] i) V_{H} domain comprises an amino acid sequence of the V_{H} domain of SEQ ID No:48 and the V_{L} domain comprises an amino acid sequence of the V_{L} domain of SEQ ID No:50;
[0552] j) V_{H} domain comprises an amino acid sequence of the V_{H} domain of SEQ ID No:49 and the V_{L} domain comprises an amino acid sequence of the V_{L} domain of SEQ ID No:50;
[0553] k) V_{H} domain comprises an amino acid sequence of the V_{H} domain of SEQ ID No:342 and the V_{L} domain comprises an amino acid sequence of the V_{L} domain of SEQ ID No:50;
[0554] l) V_{H} domain comprises an amino acid sequence of SEQ ID No:33 and the V_{L} domain comprises an amino acid sequence of the V_{L} domain of SEQ ID No:51;
[0555] m) V_{H} domain comprises an amino acid sequence of the V_{H} domain of SEQ ID No:47 and the V_{L} domain comprises an amino acid sequence of the V_{L} domain of SEQ ID No:51;
[0556] n) V_{H} domain comprises an amino acid sequence of the V_{H} domain of SEQ ID No:48 and the V_{L} domain comprises an amino acid sequence of the V_{L} domain of SEQ ID No:51;
[0557] o) V_{H} domain comprise an amino acid sequence of the V_{H} domain of SEQ ID No:49 and the V_{L} domain comprises an amino acid sequence of the V_{L} domain of SEQ ID No:51;
[0558] p) V_{H} domain comprise an amino acid sequence of the V_{H} domain of SEQ ID No:342 and the V_{L} domain comprises an amino acid sequence of the V_{L} domain of SEQ ID No:51;
[0559] q) V_{H} domain comprises an amino acid sequence of SEQ ID No:33 and the V_{L} domain comprises an amino acid sequence of the V_{L} domain of SEQ ID No:298;
[0560] r) V_{H} domain comprises an amino acid sequence of the V_{H} domain of SEQ ID No:47 and the V_{L} domain comprises an amino acid sequence of the V_{L} domain of SEQ ID No:298;
[0561] s) V_{H} domain comprises an amino acid sequence of the V_{H} domain of SEQ ID No:48 and the V_{L} domain comprises an amino acid sequence of the V_{L} domain of SEQ ID No:298;
[0562] t) V_{H} domain comprise an amino acid sequence of the V_{H} domain of SEQ ID No:49 and the V_{L} domain comprises an amino acid sequence of the V_{L} domain of SEQ ID No:298;
[0563] u) V_{H} domain comprise an amino acid sequence of the V_{H} domain of SEQ ID No:342 and the V_{L} domain comprises an amino acid sequence of the V_{L} domain of SEQ ID No:298;
[0564] v) V_{H} domain comprises an amino acid sequence of SEQ ID No:58 and the V_{L} domain comprises an amino acid sequence of SEQ ID No:68;
[0565] w) V_{H} domain comprises an amino acid sequence that is at least 85% identical to SEQ ID No:58, and the V_{L} domain comprise an amino acid sequence that is at least 85% identical to SEQ ID No:68;
[0566] x) V_{H} domain comprises an amino acid sequence of SEQ ID No:78 and the V_{L} domain comprises an amino acid sequence of SEQ ID No:88;
[0567] y) V_{H} domain comprises an amino acid sequence that is at least 85% identical to SEQ ID No:78, and the V_{L} domain comprises an amino acid sequence that is at least 85% identical to SEQ ID No:88;
[0568] z) V_{H} domain comprises an amino acid sequence of SEQ ID No:98 and the V_{L} domain comprises an amino acid sequence of SEQ ID No:108;
[0569] aa) V_{H} domain comprises an amino acid sequence that is at least 85% identical to SEQ ID No:98, and the V_{L} domain comprises an amino acid sequence that is at least 85% identical to SEQ ID No:108;
[0570] bb) V_{H} domain comprises an amino acid sequence of SEQ ID No:118 and the V_{L} domain comprises an amino acid sequence of SEQ ID No:128;
[0571] cc) V_{H} domain comprises an amino acid sequence that is at least 85% identical to SEQ ID No:118, and the V_{L} domain comprises an amino acid sequence that is at least 85% identical to SEQ ID No:128;
[0572] dd) V_{H} domain comprises an amino acid sequence of SEQ ID No:158 and the V_{L} domain comprises an amino acid sequence of SEQ ID No:168;
[0573] ee) V_{H} domain comprises an amino acid sequence that is at least 85% identical to SEQ ID No:158, and the V_{L} domain comprises an amino acid sequence that is at least 85% identical to SEQ ID No:168;
[0574] ff) V_{H} domain comprises an amino acid sequence of SEQ ID No:178 and the V_{L} domain comprises an amino acid sequence of SEQ ID No:188;
[0575] gg) V_{H} domain comprises an amino acid sequence that is at least 85% identical to SEQ ID No:178, and the V_{L} domain comprises an amino acid sequence that is at least 85% identical to SEQ ID No:188;
[0576] hh) V_{H} domain comprises an amino acid sequence of SEQ ID No:138 and the V_{L} domain comprises an amino acid sequence of SEQ ID No:148;
[0577] ii) V_{H} domain comprises an amino acid sequence that is at least 85% identical to SEQ ID No:138 and the V_{L} domain comprises an amino acid sequence that is at least 85% identical to SEQ ID No:148;
[0578] jj) V_{H} domain comprises an amino acid sequence of SEQ ID No:244 and the V_{L} domain comprises an amino acid sequence of SEQ ID No:254;
[0579] kk) V_{H} domain comprises an amino acid sequence that is at least 85% identical to SEQ ID No:244, and the V_{L} domain comprises an amino acid sequence that is at least 85% identical to SEQ ID No:254;
[0580] ll) V_{H} domain comprises an amino acid sequence of SEQ ID No:264 and the V_{L} domain comprises an amino acid sequence of SEQ ID No:274;
[0581] mm) V_{H} domain comprises an amino acid sequence that is at least 85% identical to SEQ ID No:264, and the V_{L} domain comprises an amino acid sequence that is at least 85% identical to SEQ ID No:274;
[0582] nn) V_{H} domain comprises an amino acid sequence of SEQ ID No:284 and the V_{L} domain comprises an amino acid sequence of SEQ ID No:294; and
[0583] oo) V_{H} domain comprises an amino acid sequence that is at least 85% identical to SEQ ID No:284, and the V_{L} domain comprises an amino acid sequence that is at least 85% identical to SEQ ID No:294;
[0584] pp) V_{H} domain comprises an amino acid sequence of SEQ ID No:349 and the V_{L} domain comprises an amino acid sequence of SEQ ID No:359; and
[0585] qq) V_{H} domain comprises an amino acid sequence that is at least 85% identical to SEQ ID No:349, and the V_{L} domain comprises an amino acid sequence that is at least 85% identical to SEQ ID No:359.

[0586] In one embodiment, the amino acid sequence is at least 70% identical to the specified Seq ID No. In one embodiment, the amino acid sequence is at least 75% identical to the specified Seq ID No. In one embodiment, the amino acid sequence is at least 95% identical to the specified Seq ID No. In one embodiment, the amino acid sequence is at least 96% identical to the specified Seq ID No. In one embodiment, the amino acid sequence is at least 97% identical to the specified Seq ID No. In one embodiment, the amino acid sequence is at least 98% identical to the specified Seq ID No. In one embodiment, the amino acid sequence is at least 99% identical to the specified Seq ID No. In one embodiment, the amino acid sequence is at least 99.5% identical to the specified Seq ID No.

Concept 34. The antibody according to any preceding concept wherein the antibody comprises a heavy chain and a light chain, and
[0587] a) the heavy chain amino acid sequence comprises an amino acid sequence of SEQ ID No:35 and the light chain amino acid sequence comprises an amino acid sequence of SEQ ID No:45;
[0588] b) the heavy chain amino acid sequence comprises an amino acid sequence that is at least 85% identical to SEQ ID No:35 and the light chain amino acid sequence comprises an amino acid sequence that is at least 85% identical to SEQ ID No:45;
[0589] c) the heavy chain amino acid sequence comprises an amino acid sequence of SEQ ID No:47 and the light chain amino acid sequence comprises an amino acid sequence of SEQ ID No:45;
[0590] d) the heavy chain amino acid sequence comprises an amino acid sequence of SEQ ID No:48 and the light chain amino acid sequence comprises an amino acid sequence of SEQ ID No:45;
[0591] e) the heavy chain amino acid sequence comprises an amino acid sequence of SEQ ID No:49 and the light chain amino acid sequence comprises an amino acid sequence of SEQ ID No:45;
[0592] f) the heavy chain amino acid sequence comprises an amino acid sequence of SEQ ID No:342 and the light chain amino acid sequence comprises an amino acid sequence of SEQ ID No:45;
[0593] g) the heavy chain amino acid sequence comprises an amino acid sequence of SEQ ID No:35 and the light chain amino acid sequence comprises an amino acid sequence of SEQ ID No:50;
[0594] h) the heavy chain amino acid sequence comprises an amino acid sequence of SEQ ID No:47 and the light chain amino acid sequence comprises an amino acid sequence of SEQ ID No:50;
[0595] i) the heavy chain amino acid sequence comprises an amino acid sequence of SEQ ID No:48 and the light chain amino acid sequence comprises an amino acid sequence of SEQ ID No:50;
[0596] j) the heavy chain amino acid sequence comprises an amino acid sequence of SEQ ID No:49 and the light chain amino acid sequence comprises an amino acid sequence of SEQ ID No:50;
[0597] k) the heavy chain amino acid sequence comprises an amino acid sequence of SEQ ID No:342 and the light chain amino acid sequence comprises an amino acid sequence of SEQ ID No:50;
[0598] l) the heavy chain amino acid sequence comprises an amino acid sequence of SEQ ID No:35 and the light chain amino acid sequence comprises an amino acid sequence of SEQ ID No:51;
[0599] m) the heavy chain amino acid sequence comprises an amino acid sequence of SEQ ID No:47 and the light chain amino acid sequence comprises an amino acid sequence of SEQ ID No:51;
[0600] n) the heavy chain amino acid sequence comprises an amino acid sequence of SEQ ID No:48 and the light chain amino acid sequence comprises an amino acid sequence of SEQ ID No:51;
[0601] o) the heavy chain amino acid sequence comprises an amino acid sequence of SEQ ID No:49 and the light chain amino acid sequence comprises an amino acid sequence of SEQ ID No:51;
[0602] p) the heavy chain amino acid sequence comprises an amino acid sequence of SEQ ID No:342 and the light chain amino acid sequence comprises an amino acid sequence of SEQ ID No:51;
[0603] q) the heavy chain amino acid sequence comprises an amino acid sequence of SEQ ID No:35 and the light chain amino acid sequence comprises an amino acid sequence of SEQ ID No:298;
[0604] r) the heavy chain amino acid sequence comprises an amino acid sequence of SEQ ID No:47 and the light chain amino acid sequence comprises an amino acid sequence of SEQ ID No:298;
[0605] s) the heavy chain amino acid sequence comprises an amino acid sequence of SEQ ID No:48 and the light chain amino acid sequence comprises an amino acid sequence of SEQ ID No:298;
[0606] t) the heavy chain amino acid sequence comprises an amino acid sequence of SEQ ID No:49 and the light chain amino acid sequence comprises an amino acid sequence of SEQ ID No:298;
[0607] u) the heavy chain amino acid sequence comprises an amino acid sequence of SEQ ID No:342 and the light chain amino acid sequence comprises an amino acid sequence of SEQ ID No:298;
[0608] v) the heavy chain amino acid sequence comprises an amino acid sequence of SEQ ID No:60 and the light chain amino acid sequence comprises an amino acid sequence of SEQ ID No:70;
[0609] w) the heavy chain amino acid sequence comprises an amino acid sequence that is at least 85% identical to SEQ ID No:60, and the light chain amino acid sequence comprises an amino acid sequence that is at least 85% identical to SEQ ID No:70;
[0610] x) the heavy chain amino acid sequence comprises an amino acid sequence of SEQ ID No:80 and the light chain amino acid sequence comprises an amino acid sequence of SEQ ID No:90;
[0611] y) the heavy chain amino acid sequence comprises an amino acid sequence that is at least 85% identical to SEQ ID No:80, and the light chain amino acid sequence comprises an amino acid sequence that is at least 85% identical to SEQ ID No:90;
[0612] z) the heavy chain amino acid sequence comprises an amino acid sequence of SEQ ID No:100 and the light chain amino acid sequence comprises an amino acid sequence of SEQ ID No:110;
[0613] aa) the heavy chain amino acid sequence comprises an amino acid sequence that is at least 85% identical to SEQ ID No:100, and the light chain amino acid sequence comprises an amino acid sequence that is at least 85% identical to SEQ ID No:110;
[0614] bb) the heavy chain amino acid sequence comprises an amino acid sequence of SEQ ID No:120 and the light chain amino acid sequence comprises an amino acid sequence of SEQ ID No:130;
[0615] cc) the heavy chain amino acid sequence comprises an amino acid sequence that is at least 85% identical to SEQ ID No:120, and the light chain amino acid sequence comprises an amino acid sequence that is at least 85% identical to SEQ ID No:130;
[0616] dd) the heavy chain amino acid sequence comprises an amino acid sequence of SEQ ID No:160 and the light chain amino acid sequence comprises an amino acid sequence of SEQ ID No:170;
[0617] ee) the heavy chain amino acid sequence comprises an amino acid sequence that is at least 85% identical to SEQ ID No:160, and the light chain amino acid sequence comprises an amino acid sequence that is at least 85% identical to SEQ ID No:170;
[0618] ff) the heavy chain amino acid sequence comprises an amino acid sequence of SEQ ID No:180 and the light chain amino acid sequence comprises an amino acid sequence of SEQ ID No:190;
[0619] gg) the heavy chain amino acid sequence comprises an amino acid sequence that is at least 85% identical to SEQ ID No:180, and the light chain amino acid sequence comprises an amino acid sequence that is at least 85% identical to SEQ ID No:190
[0620] hh) the heavy chain amino acid sequence comprises an amino acid sequence of SEQ ID No:140 and the light chain amino acid sequence comprises an amino acid sequence of SEQ ID No:150;
[0621] ii) the heavy chain amino acid sequence comprises an amino acid sequence that is at least 85% identical to SEQ ID No:140, and the light chain amino acid sequence comprises an amino acid sequence that is at least 85% identical to SEQ ID No:150;
[0622] jj) the heavy chain amino acid sequence comprises an amino acid sequence of SEQ ID No:246 and the light chain amino acid sequence comprises an amino acid sequence of SEQ ID No:256;
[0623] kk) the heavy chain amino acid sequence comprises an amino acid sequence that is at least 85% identical to SEQ ID No:246, and the light chain amino acid sequence comprises an amino acid sequence that is at least 85% identical to SEQ ID No:256;
[0624] ll) the heavy chain amino acid sequence comprises an amino acid sequence of SEQ ID No:266 and the light chain amino acid sequence comprises an amino acid sequence of SEQ ID No:276;
[0625] mm) the heavy chain amino acid sequence comprises an amino acid sequence that is at least 85% identical to SEQ ID No:266, and the light chain amino acid sequence comprises an amino acid sequence that is at least 85% identical to SEQ ID No:276;
[0626] nn) the heavy chain amino acid sequence comprises an amino acid sequence of SEQ ID No:286 and the light chain amino acid sequence comprises an amino acid sequence of SEQ ID No:296; and
[0627] oo) the heavy chain amino acid sequence comprises an amino acid sequence that is at least 85% identical to SEQ ID No:286, and the light chain amino acid sequence comprises an amino acid sequence that is at least 85% identical to SEQ ID No:296;
[0628] pp) the heavy chain amino acid sequence comprises an amino acid sequence of SEQ ID No:351 and the light chain amino acid sequence comprises an amino acid sequence of SEQ ID No:361; and
[0629] qq) the heavy chain amino acid sequence comprises an amino acid sequence that is at least 85% identical to SEQ ID No:351, and the light chain amino acid sequence comprises an amino acid sequence that is at least 85% identical to SEQ ID No:361.

[0630] In one embodiment, the amino acid sequence is at least 70% identical to the specified Seq ID No. In one embodiment, the amino acid sequence is at least 75% identical to the specified Seq ID No. In one embodiment, the amino acid sequence is at least 95% identical to the specified Seq ID No. In one embodiment, the amino acid sequence is at least 96% identical to the specified Seq ID No. In one embodiment, the amino acid sequence is at least 97% identical to the specified Seq ID No. In one embodiment, the amino acid sequence is at least 98% identical to the specified Seq ID No. In one embodiment, the amino acid sequence is at least 99% identical to the specified Seq ID No. In one embodiment, the amino acid sequence is at least 99.5% identical to the specified Seq ID No.

Concept 35. The antibody or fragment according to any preceding concept which competes for binding to hPD-L1 with the antibody 1D05, optionally wherein the competition for binding to hPD-L1 is conducted using SPR.

[0631] SPR may be carried out as described hereinabove, or as described in concept 16.

Concept 36. The antibody or fragment according to any preceding concept wherein the antibody or fragment is capable of inhibiting PD-L1-mediated suppression of T-cells, optionally wherein the suppression of T-cells is measured by an increase in one or more of IFNγ, IL-2, CD25 or proliferation of T-cells in an assay that provides co-stimulation by either direct CD3/CD28 stimulation, superantigen stimulation or provides co-stimulation by co-incubation with cells capable of inducing a T-cell response.

[0632] The measurements may be carried out with any suitable technique. For example, the measurements may be taken with ELISA, HTRF, BRDU incorporation (proliferation), electrochemiluminescence (ECL) or flow cytometry (e.g. FACS). These techniques are well-known to those skilled in the art and are described elsewhere herein. In one embodiment, the assay is flow cytometry. In one embodiment, the assay is ELISA. In one embodiment, the assay is HTRF.

[0633] In one embodiment, the suppression of T-cells is measured by an increase in IFNγ. In one embodiment, the suppression of T-cells is measured by an increase in IL-2. In one embodiment, the suppression of T-cells is measured by an increase in CD25. In one embodiment, the suppression of T-cells is measured by an increase in IFNγ and IL-2. In one embodiment, the suppression of T-cells is measured by an increase in IFNγ and CD25. In one embodiment, the suppression of T-cells is measured by an increase in CD25 and IL-2. In one embodiment, the suppression of T-cells is measured by an increase in IFNγ, IL-2 and CD25.

[0634] In one embodiment, the co-stimulation is provided by direct CD3/CD28 stimulation.

[0635] In one embodiment, the co-stimulation is provided by a superantigen, such as staphylococcal enterotoxin B (SEB).

[0636] In one embodiment, the assay provides co-stimulation by co-incubation with cells capable of inducing a T-cell response. Such cells may be antigen-presenting cells (APCs), for example monocytes, B-cells or dendritic cells. In one embodiment, the assay provides co-stimulation by co-incubation with APCs. In one embodiment, the assay provides co-stimulation by co-incubation with monocytes. In one embodiment, the assay provides co-stimulation by co-incubation with B-cells. In one embodiment, the assay provides co-stimulation by co-incubation with dendritic cells.

Concept 37. A bispecific antibody or fusion protein comprising an antibody or fragment thereof as defined in any preceding concept.

[0637] Concept 37a. A dual binding antibody or fusion protein comprising an antibody or fragment thereof as defined in any preceding concept.

[0638] A dual binding antibody has the meaning as set out above.

Concept 38. The bispecific antibody according to concept 37, wherein the bispecific format is selected from DVD-Ig, mAb², FIT-Ig, mAb-dAb, dock and lock, SEEDbody, scDiabody-Fc, diabody-Fc, tandem scFv-Fc, Fab-scFv-Fc, Fab-scFv, intrabody, BITE, diabody, DART, TandAb, scDiabody, scDiabody-CH₃, Diabody-CH₃, minibody, knobs-in-holes, knobs-in-holes with common light chain, knobs-in-holes with common light chain and charge pairs, charge pairs, charge pairs with common light chain, in particular mAb², knob-in-holes, knob-in-holes with common light chain, knobs-in-holes with common light chain and charge pairs and FIT-Ig, e.g. mAb² and FIT-Ig.

[0639] In one embodiment, the bispecific format is selected from DVD-Ig, mAb², FIT-Ig, mAb-dAb, dock and lock, Fab-arm exchange, SEEDbody, Triomab, LUZ-Y, Fcab, KA-body, orthogonal Fab, scDiabody-Fc, diabody-Fc, tandem scFv-Fc, Fab-scFv-Fc, Fab-scFv, intrabody, BITE, diabody, DART, TandAb, scDiabody, scDiabody-CH3, Diabody-CH₃, Triple body, Miniantibody, minibody, TriBi minibody, scFv-CH₃ KIH, scFv-CH-CL-scFv, F(ab′)2-scFv, scFv-KIH, Fab-scFv-Fc, tetravalent HCab, ImmTAC, knobs-in-holes, knobs-in-holes with common light chain, knobs-in-holes with common light chain and charge pairs, charge pairs, charge pairs with common light chain, DT-IgG, DutaMab, IgG(H)-scFv, scFv-(H)IgG, IgG(L)-scFv, scFv-(L)IgG, IgG(L,H)-Fv, IgG(H)-V, V(H)IgG, IgG(L)-V, V(L)-IgG, KIH IgG-scFab, 2scFv-IgG, IgG-2scFv, scFv4-Ig and zybody.

[0640] In one embodiment, the bispecific format is selected from DVD-Ig, FIT-Ig, mAb-dAb, dock and lock, Fab-arm exchange, SEEDbody, Triomab, LUZ-Y, Fcab, KA-body, orthogonal Fab, scDiabody-Fc, diabody-Fc, tandem scFv-Fc, Fab-scFv-Fc, Fab-scFv, intrabody, BiTE, diabody, DART, TandAb, scDiabody, scDiabody-CH₃, Diabody-CH₃, Triple body, Miniantibody, minibody, TriBi minibody, scFv-CH₃ KIH, scFv-CH-CL-scFv, F(ab′)₂-scFv, scFv-KIH, Fab-scFv-Fc, tetravalent HCab, ImmTAC, knobs-in-holes, knobs-in-holes with common light chain, knobs-in-holes with common light chain and charge pairs, charge pairs, charge pairs with common light chain, DT-IgG, DutaMab, IgG(H)-scFv, scFv-(H)IgG, IgG(L)-scFv, scFv-(L)IgG, IgG(L,H)-Fv, IgG(H)-V, V(H)-IgG, IgG(L)-V, V(L)-IgG, KIH IgG-scFab, 2scFv-IgG, IgG-2scFv, scFv4-Ig and zybody, for example DVD-Ig, FIT-Ig, mAb-dAb, dock and lock, SEEDbody, scDiabody-Fc, diabody-Fc, tandem scFv-Fc, Fab-scFv-Fc, Fab-scFv, intrabody, BiTE, diabody, DART, TandAb, scDiabody, scDiabody-CH₃, Diabody-CH₃, minibody, knobs-in-holes, knobs-in-holes with common light chain, knobs-in-holes with common light chain and charge pairs, charge pairs, charge pairs with common light chain, in particular knob-in-holes, knob-in-holes with common light chain, knobs-in-holes with common light chain and charge pairs and FIT-Ig, e.g. FIT-Ig.

[0641] In one embodiment, the bispecific format is selected from DVD-Ig, mAb², mAb-dAb, dock and lock, Fab-arm exchange, SEEDbody, Triomab, LUZ-Y, Fcab, KA-body, orthogonal Fab, scDiabody-Fc, diabody-Fc, tandem scFv-Fc, Fab-scFv-Fc, Fab-scFv, intrabody, BiTE, diabody, DART, TandAb, scDiabody, scDiabody-CH₃, Diabody-CH₃, Triple body, Miniantibody, minibody, TriBi minibody, scFv-CH₃ KIH, scFv-CH-CL-scFv, F(ab′)₂-scFv, scFv-KIH, Fab-scFv-Fc, tetravalent HCab, ImmTAC, knobs-in-holes, knobs-in-holes with common light chain, knobs-in-holes with common light chain and charge pairs, charge pairs, charge pairs with common light chain, DT-IgG, DutaMab, IgG(H)-scFv, scFv-(H)IgG, IgG(L)-scFv, scFv-(L)IgG, IgG(L,H)-Fv, IgG(H)-V, V(H)-IgG, IgG(L)-V, V(L)-IgG, KIH IgG-scFab, 2scFv-IgG, IgG-2scFv, scFv4-Ig and zybody, for example DVD-Ig, mAb², mAb-dAb, dock and lock, SEEDbody, scDiabody-Fc, diabody-Fc, tandem scFv-Fc, Fab-scFv-Fc, Fab-scFv, intrabody, BITE, diabody, DART, TandAb, scDiabody, scDiabody-CH₃, Diabody-CH₃, minibody, knobs-in-holes, knobs-in-holes with common light chain, knobs-in-holes with common light chain and charge pairs, charge pairs, charge pairs with common light chain, in particular mAb², knob-in-holes, knobs-in-holes with common light chain and charge pairs, and knob-in-holes with common light chain, e.g. mAb².

[0642] In one embodiment, the bispecific format is selected from DVD-Ig, mAb-dAb, dock and lock, Fab-arm exchange, SEEDbody, Triomab, LUZ-Y, Fcab, KA-body, orthogonal Fab, scDiabody-Fc, diabody-Fc, tandem scFv-Fc, Fab-scFv-Fc, Fab-scFv, intrabody, BITE, diabody, DART, TandAb, scDiabody, scDiabody-CH₃, Diabody-CH₃, Triple body, Miniantibody, minibody, TriBi minibody, scFv-CH₃ KIH, scFv-CH-CL-scFv, F(ab′)₂-scFv, scFv-KIH, Fab-scFv-Fc, tetravalent HCab, ImmTAC, knobs-in-holes, knobs-in-holes with common light chain, knobs-in-holes with common light chain and charge pairs, charge pairs, charge pairs with common light chain, DT-IgG, DutaMab, IgG(H)-scFv, scFv-(H)IgG, IgG(L)-scFv, scFv-(L)IgG, IgG(L,H)-Fv, IgG(H)-V, V(H)-IgG, IgG(L)-V, V(L)-IgG, KIH IgG-scFab, 2scFv-IgG, IgG-2scFv, scFv4-Ig and zybody, for example DVD-Ig, mAb-dAb, dock and lock, SEEDbody, scDiabody-Fc, diabody-Fc, tandem scFv-Fc, Fab-scFv-Fc, Fab-scFv, intrabody, BITE, diabody, DART, TandAb, scDiabody, scDiabody-CH₃, Diabody-CH₃, minibody, knobs-in-holes, knobs-in-holes with common light chain, knobs-in-holes with common light chain and charge pairs, charge pairs, charge pairs with common light chain, in particular knob-in-holes, knobs-in-holes with common light chain and charge pairs, and knob-in-holes with common light chain.

Concept 39. The bispecific antibody according to concept 37 or concept 38, wherein the bispecific antibody specifically binds to hPD-L1 and another target antigen selected from immune checkpoint inhibitors (such as PD-1, CTLA-4, TIGIT, TIM-3, LAG-3 and VISTA, e.g. TIGIT, TIM-3 and LAG-3), immune modulators (such as BTLA, hHVEM, CSF1R, CCR4, CD39, CD40, CD73, CD96, CXCR2, CXCR4, CD200, GARP, SIRPα, CXCL9, CXCL10, CXCL11 and CD155, e.g. GARP, SIRPα, CXCR4, BTLA, hVEM and CSF1R), immune activators (such as CD137, GITR, OX40, CD40, CXCR3 (e.g. agonistic anti-CXCR3 antibodies), CD27, CD3, ICOS (e.g. agonistic anti-ICOS antibodies), for example. ICOS, CD137, GITR and OX40).

[0643] Concept 39a. A bispecific antibody which binds to hPD-L1 with a V_{H}, a V_{L}, or a paired V_{H} and V_{L} comprising one or more of the CDRs (e.g. CDRH3 and CDRL3) or variable region sequences of any of the antibodies described in Aspect 1a hereinbelow, and another target antigen selected from immune checkpoint inhibitors (such as PD-1, CTLA-4, TIGIT, TIM-3, LAG-3 and VISTA, e.g. TIGIT, TIM-3 and LAG-3), immune modulators (such as BTLA, hHVEM, CSF1R, CCR4, CD39, CD40, CD73, CD96, CXCR2, CXCR4, CD200, GARP, SIRPα, CXCL9, CXCL10, CXCL11 and CD155, e.g. GARP, SIRPα, CXCR4, BTLA, hVEM and CSF1R), immune activators (such as CD137, GITR, OX40, CD40, CXCR3 (e.g. agonistic anti-CXCR3 antibodies), CD27, CD3, ICOS (e.g. agonistic anti-ICOS antibodies), for example. ICOS, CD137, GITR and OX40).

[0644] Concept 39b. The bispecific antibody according to concept 37 or concept 38, wherein the bispecific antibody specifically binds to hPD-L1 and another target antigen selected from immune checkpoint inhibitors (such as PD-1, CTLA-4, TIGIT, TIM-3, LAG-3 and VISTA, e.g. TIGIT, TIM-3 and LAG-3), immune modulators (such as BTLA, hHVEM, CSF1R, CCR4, CD39, CD40, CD73, CD96, CXCR2, CXCR4, CD200, GARP, SIRPα, CXCL9, CXCL10 and CD155, e.g. GARP, SIRPα, CXCR4, BTLA, hVEM and CSF1R), immune activators (such as CD137, GITR, OX40, CD40, CXCR3 (e.g. agonistic anti-CXCR3 antibodies), CD3, ICOS (e.g. agonistic anti-ICOS antibodies), for example. ICOS, CD137, GITR and OX40).

[0645] In one embodiment, the another target antigen is an immune checkpoint inhibitor, such as PD-1, CTLA-4, TIGIT, TIM-3, LAG-3 and VISTA, e.g. TIGIT, CTLA-4, TIM-3 and LAG-3. In one embodiment, the another target antigen is an immune modulator, such as BTLA, hHVEM, CSF1R, CCR4, CD39, CD40, CD73, CD96, CXCR2, CXCR4, CD200, GARP, SIRPα, CXCL9, CXCL10, CXCL11 and CD155, or such as such as BTLA, hHVEM, CSF1R, CCR4, CD39, CD40, CD73, CD96, CXCR2, CXCR4, CD200, GARP, SIRPα, CXCL9, CXCL10 and CD155 e.g. GARP, SIRPα, CXCR4, BTLA, hVEM and CSF1R. In one embodiment, the another target antigen is an immune activator, such as CD137, GITR, OX40, CD40, CXCR3 (e.g. agonistic anti-CXCR3 antibodies), CD27, CD3 and ICOS (e.g. agonistic anti-ICOS antibodies), or CD137, GITR, OX40, CD40, CXCR3 (e.g. agonistic anti-CXCR3 antibodies), CD3 and ICOS (e.g. agonistic anti-ICOS antibodies), for example ICOS, CD137, GITR and OX40). In one embodiment, the another target antigen is CTLA-4. In one embodiment, the another target antigen is TIGIT. In one embodiment, the another target antigen is TIM-3. In one embodiment, the another target antigen is LAG-3. In one embodiment, the another target antigen is GITR. In one embodiment, the another target antigen is VISTA. In one embodiment, the another target antigen is CD137. In one embodiment, the another target antigen is SIRPα. In one embodiment, the another target antigen is CXCL10. In one embodiment, the another target antigen is CD155. In one embodiment, the another target antigen is CD40.

[0646] In another embodiment, the bispecific antibody binds another target antigen which is PD-1 and the binding to PD-1 is provided by an antigen-binding domain (for example, a V_{H}, a V_{L} or a paired V_{H} and V_{L}) having any of the sequences, including CDR sequences (for example CDRH3 and/or CDRL3) or variable region sequences as described in Aspect 1A hereinbelow.

[0647] In another embodiment, the bispecific antibody binds another target antigen which is CTLA4 and the binding to CTLA4 is provided by an antigen-binding domain (for example, a V_{H}, a V_{L} or a paired V_{H} and V_{L}) having any of the sequences, including CDR sequences (for example CDRH3 and/or CDRL3) or variable region sequences as described in Aspect 1A hereinbelow.

[0648] In another embodiment, the bispecific antibody binds another target antigen which is TIGIT and the binding to TIGIT is provided by an antigen-binding domain (for example, a V_{H}, a V_{L} or a paired V_{H} and V_{L}) having any of the sequences, including CDR sequences (for example CDRH3 and/or CDRL3) or variable region sequences as described in Aspect 1A hereinbelow.

[0649] In another embodiment, the bispecific antibody binds another target antigen which is TIM-3 and the binding to TIM-3 is provided by an antigen-binding domain (for example, a V_{H}, a V_{L} or a paired V_{H} and V_{L}) having any of the sequences, including CDR sequences (for example CDRH3 and/or CDRL3) or variable region sequences as described in Aspect 1A hereinbelow.

[0650] In another embodiment, the bispecific antibody binds another target antigen which is LAG3 and the binding to LAG3 is provided by an antigen-binding domain (for example, a V_{H}, a V_{L} or a paired V_{H} and V_{L}) having any of the sequences, including CDR sequences (for example CDRH3 and/or CDRL3) or variable region sequences as described in Aspect 1A hereinbelow.

[0651] In another embodiment, the bispecific antibody binds another target antigen which is VISTA and the binding to VISTA is provided by an antigen-binding domain (for example, a V_{H}, a V_{L} or a paired V_{H} and V_{L}) having any of the sequences, including CDR sequences (for example CDRH3 and/or CDRL3) or variable region sequences as described in Aspect 1A hereinbelow.

[0652] In another embodiment, the bispecific antibody binds another target antigen which is BTLA and the binding to BTLA is provided by an antigen-binding domain (for example, a V_{H}, a V_{L} or a paired V_{H} and V_{L}) having any of the sequences, including CDR sequences (for example CDRH3 and/or CDRL3) or variable region sequences as described in Aspect 1A hereinbelow.

[0653] In another embodiment, the bispecific antibody binds another target antigen which is hHVEM and the binding to hHVEM is provided by an antigen-binding domain (for example, a V_{H}, a V_{L} or a paired V_{H} and V_{L}) having any of the sequences, including CDR sequences (for example CDRH3 and/or CDRL3) or variable region sequences as described in Aspect 1A hereinbelow.

[0654] In another embodiment, the bispecific antibody binds another target antigen which is CSF1R and the binding to CSF1R is provided by an antigen-binding domain (for example, a V_{H}, a V_{L} or a paired V_{H} and V_{L}) having any of the sequences, including CDR sequences (for example CDRH3 and/or CDRL3) or variable region sequences as described in Aspect 1A hereinbelow.

[0655] In another embodiment, the bispecific antibody binds another target antigen which is CCR4 and the binding to CCR4 is provided by an antigen-binding domain (for example, a V_{H}, a V_{L} or a paired V_{H} and V_{L}) having any of the sequences, including CDR sequences (for example CDRH3 and/or CDRL3) or variable region sequences as described in Aspect 1A hereinbelow.

[0656] In another embodiment, the bispecific antibody binds another target antigen which is CD39 and the binding to CD39 is provided by an antigen-binding domain (for example, a V_{H}, a V_{L} or a paired V_{H} and V_{L}) having any of the sequences, including CDR sequences (for example CDRH3 and/or CDRL3) or variable region sequences as described in Aspect 1A hereinbelow.

[0657] In another embodiment, the bispecific antibody binds another target antigen which is CD40 and the binding to CD40 is provided by an antigen-binding domain (for example, a V_{H}, a V_{L} or a paired V_{H} and V_{L}) having any of the sequences, including CDR sequences (for example CDRH3 and/or CDRL3) or variable region sequences as described in Aspect 1A hereinbelow.

[0658] In another embodiment, the bispecific antibody binds another target antigen which is CD73 and the binding to CD73 is provided by an antigen-binding domain (for example, a V_{H}, a V_{L} or a paired V_{H} and V_{L}) having any of the sequences, including CDR sequences (for example CDRH3 and/or CDRL3) or variable region sequences as described in Aspect 1A hereinbelow.

[0659] In another embodiment, the bispecific antibody binds another target antigen which is CD96 and the binding to CD96 is provided by an antigen-binding domain (for example, a V_{H}, a V_{L} or a paired V_{H} and V_{L}) having any of the sequences, including CDR sequences (for example CDRH3 and/or CDRL3) or variable region sequences as described in Aspect 1A hereinbelow.

[0660] In another embodiment, the bispecific antibody binds another target antigen which is CXCR2 and the binding to CXCR2 is provided by an antigen-binding domain (for example, a V_{H}, a V_{L} or a paired V_{H} and V_{L}) having any of the sequences, including CDR sequences (for example CDRH3 and/or CDRL3) or variable region sequences as described in Aspect 1A hereinbelow.

[0661] In another embodiment, the bispecific antibody binds another target antigen which is CXCR4 and the binding to CXCR4 is provided by an antigen-binding domain (for example, a V_{H}, a V_{L} or a paired V_{H} and V_{L}) having any of the sequences, including CDR sequences (for example CDRH3 and/or CDRL3) or variable region sequences as described in Aspect 1A hereinbelow.

[0662] In another embodiment, the bispecific antibody binds another target antigen which is CD200 and the binding to CD200 is provided by an antigen-binding domain (for example, a V_{H}, a V_{L} or a paired V_{H} and V_{L}) having any of the sequences, including CDR sequences (for example CDRH3 and/or CDRL3) or variable region sequences as described in Aspect 1A hereinbelow.

[0663] In another embodiment, the bispecific antibody binds another target antigen which is GARP and the binding to GARP is provided by an antigen-binding domain (for example, a V_{H}, a V_{L} or a paired V_{H} and V_{L}) having any of the sequences, including CDR sequences (for example CDRH3 and/or CDRL3) or variable region sequences as described in Aspect 1A hereinbelow.

[0664] In another embodiment, the bispecific antibody binds another target antigen which is SIRPα and the binding to SIRPα is provided by an antigen-binding domain (for example, a V_{H}, a V_{L} or a paired V_{H} and V_{L}) having any of the sequences, including CDR sequences (for example CDRH3 and/or CDRL3) or variable region sequences as described in Aspect 1A hereinbelow.

[0665] In another embodiment, the bispecific antibody binds another target antigen which is CXCL9 and the binding to CXCL9 is provided by an antigen-binding domain (for example, a V_{H}, a V_{L} or a paired V_{H} and V_{L}) having any of the sequences, including CDR sequences (for example CDRH3 and/or CDRL3) or variable region sequences as described in Aspect 1A hereinbelow.

[0666] In another embodiment, the bispecific antibody binds another target antigen which is CXCL10 and the binding to CXCL10 is provided by an antigen-binding domain (for example, a V_{H}, a V_{L} or a paired V_{H} and V_{L}) having any of the sequences, including CDR sequences (for example CDRH3 and/or CDRL3) or variable region sequences as described in Aspect 1A hereinbelow.

[0667] In another embodiment, the bispecific antibody binds another target antigen which is CXCL11 and the binding to CXCL11 is provided by an antigen-binding domain (for example, a V_{H}, a V_{L} or a paired V_{H} and V_{L}) having any of the sequences, including CDR sequences (for example CDRH3 and/or CDRL3) or variable region sequences as described in Aspect 1A hereinbelow.

[0668] In another embodiment, the bispecific antibody binds another target antigen which is CD155 and the binding to CD155 is provided by an antigen-binding domain (for example, a V_{H}, a V_{L} or a paired V_{H} and V_{L}) having any of the sequences, including CDR sequences (for example CDRH3 and/or CDRL3) or variable region sequences as described in Aspect 1A hereinbelow.

[0669] In another embodiment, the bispecific antibody binds another target antigen which is CD137 and the binding to CD137 is provided by an antigen-binding domain (for example, a V_{H}, a V_{L} or a paired V_{H} and V_{L}) having any of the sequences, including CDR sequences (for example CDRH3 and/or CDRL3) or variable region sequences as described in Aspect 1A hereinbelow.

[0670] In another embodiment, the bispecific antibody binds another target antigen which is GITR and the binding to GITR is provided by an antigen-binding domain (for example, a V_{H}, a V_{L} or a paired V_{H} and V_{L}) having any of the sequences, including CDR sequences (for example CDRH3 and/or CDRL3) or variable region sequences as described in Aspect 1A hereinbelow.

[0671] In another embodiment, the bispecific antibody binds another target antigen which is OX40 and the binding to OX40 is provided by an antigen-binding domain (for example, a V_{H}, a V_{L} or a paired V_{H} and V_{L}) having any of the sequences, including CDR sequences (for example CDRH3 and/or CDRL3) or variable region sequences as described in Aspect 1A hereinbelow.

[0672] In another embodiment, the bispecific antibody binds another target antigen which is CD40 and the binding to CD40 is provided by an antigen-binding domain (for example, a V_{H}, a V_{L} or a paired V_{H} and V_{L}) having any of the sequences, including CDR sequences (for example CDRH3 and/or CDRL3) or variable region sequences as described in Aspect 1A hereinbelow.

[0673] In another embodiment, the bispecific antibody binds another target antigen which is CXCR3 and the binding to CXCR3 is provided by an antigen-binding domain (for example, a V_{H}, a V_{L} or a paired V_{H} and V_{L}) having any of the sequences, including CDR sequences (for example CDRH3 and/or CDRL3) or variable region sequences as described in Aspect 1A hereinbelow.

[0674] In another embodiment, the bispecific antibody binds another target antigen which is CD27 and the binding to CD27 is provided by an antigen-binding domain (for example, a V_{H}, a V_{L} or a paired V_{H} and V_{L}) having any of the sequences, including CDR sequences (for example CDRH3 and/or CDRL3) or variable region sequences as described in Aspect 1A hereinbelow.

[0675] In another embodiment, the bispecific antibody binds another target antigen which is CD3 and the binding to CD3 is provided by an antigen-binding domain (for example, a V_{H}, a V_{L} or a paired V_{H} and V_{L}) having any of the sequences, including CDR sequences (for example CDRH3 and/or CDRL3) or variable region sequences as described in Aspect 1A hereinbelow.

[0676] In another embodiment, the bispecific antibody binds another target antigen which is ICOS and the binding to ICOS is provided by an antigen-binding domain (for example, a V_{H}, a V_{L} or a paired V_{H} and V_{L}) having any of the sequences, including CDR sequences (for example CDRH3 and/or CDRL3) or variable region sequences as described in arrangement 5 and arrangement 5a hereinbelow, and any of the anti-ICOS antibodies described in sentences 1 to 102 and sentences 1a to 21a.

[0677] In one embodiment, the bispecific antibody has a FIT-Ig format which comprises a full antibody (e.g. an antibody comprising a light chain comprising a V_{L} and C_{L} and a heavy chain comprising V_{H}, CH₁, CH₂ and CH₃) which binds hPD-L1 (optionally wherein the antibody has a structure as defined in any one of concepts 1 to 40, or wherein the antibody has a sequence—including CDRs and variable regions—as defined in Aspect 1a hereinbelow) and a Fab which binds GITR (optionally wherein the GITR Fab has a sequence—including CDRs and variable regions—as defined in Aspect 1a hereinbelow). In one embodiment, the bispecific antibody has a FIT-Ig format which comprises a full antibody (e.g. an antibody comprising a light chain comprising a V_{L} and C_{L} and a heavy chain comprising V_{H}, CH₁, CH₂ and CH₃) which binds GITR (optionally wherein the GITR antibody has a sequence—including CDRs and variable regions—as defined in Aspect 1a hereinbelow) and a Fab which binds hPD-L1 (optionally wherein the antibody has a structure as defined in any one of concepts 1 to 40, or wherein the antibody has a sequence—including CDRs and variable regions—as defined in Aspect 1a hereinbelow). In one embodiment, the FIT-Ig is effector-enabled (e.g. as described in any of concepts 30 to 32). In another embodiment, the FIT-Ig is effector-disabled (e.g. is an IgG4 format, or as described in any of concepts 30 to 31).

[0678] In one embodiment, the bispecific antibody has a FIT-Ig format which comprises a full antibody (e.g. an antibody comprising a light chain comprising a V_{L} and C_{L} and a heavy chain comprising V_{H}, CH₁, CH₂ and CH₃) which binds hPD-L1 (optionally wherein the antibody has a structure as defined in any one of concepts 1 to 40, or wherein the antibody has a sequence—including CDRs and variable regions—as defined in Aspect 1a hereinbelow) and a Fab which binds ICOS (e.g. binds with agonistic activity and optionally wherein the ICOS Fab has a sequence—including CDRs and variable regions—as defined in arrangement 5, or in arrangement 5a, or in sentences 1 to 102, or in sentences 1a to 21a hereinbelow). In one embodiment, the ICOS Fab has a sequence of any of the ICOS antibodies described herein in sentences 1 to 102 or in sentences 1a to 21a) In one embodiment, the bispecific antibody has a FIT-Ig format which comprises a full antibody (e.g. an antibody comprising a light chain comprising a V_{L} and C_{L} and a heavy chain comprising V_{H}, CH₁, CH₂ and CH₃) which binds ICOS (e.g. binds with agonistic activity or optionally wherein the ICOS antibody has a sequence—including CDRs and variable regions—as defined in arrangement 5, or in arrangement 5a, or in sentences 1 to 102, or in sentences 1a to 21a hereinbelow) and a Fab which binds hPD-L1 (optionally wherein the antibody has a structure as defined in any one of concepts 1 to 40, or wherein the antibody has a sequence—including CDRs and variable regions—as defined in Aspect 1A hereinbelow). In one embodiment, the FIT-Ig is effector-enabled (e.g. as described in any of concepts 30 to 32). In another embodiment, the FIT-Ig is effector-disabled (e.g. is an IgG4 format, or as described in any of concepts 30 or 31).

[0679] In one embodiment, the bispecific antibody has a FIT-Ig format which comprises a full antibody (e.g. an antibody comprising a light chain comprising a V_{L} and C_{L} and a heavy chain comprising V_{H}, CH₁, CH₂ and CH₃) which binds hPD-L1 (optionally wherein the antibody has a structure as defined in any one of concepts 1 to 40, or wherein the antibody has a sequence—including CDRs and variable regions—as defined in Aspect 1a hereinbelow) and a Fab which binds TIM-3 (optionally wherein the TIM-3 Fab has a sequence—including CDRs and variable regions—as defined in Aspect 1a hereinbelow). In one embodiment, the bispecific antibody has a FIT-Ig format which comprises a full antibody (e.g. an antibody comprising a light chain comprising a V_{L} and C_{L} and a heavy chain comprising V_{H}, CHI, CH₂ and CH₃) which binds TIM-3 (optionally wherein the TIM-3 antibody has a sequence—including CDRs and variable regions—as defined in Aspect 1a hereinbelow) and a Fab which binds hPD-L1 (optionally wherein the antibody has a structure as defined in any one of concepts 1 to 40, or wherein the antibody has a sequence—including CDRs and variable regions—as defined in Aspect 1a hereinbelow). In one embodiment, the FIT-Ig is effector-enabled (e.g. as described in any of concepts 30 to 32). In another embodiment, the FIT-Ig is effector-disabled (e.g. is an IgG4 format, or as described in any of concepts 30 or 31).

[0680] In one embodiment, the bispecific antibody has a FIT-Ig format which comprises a full antibody (e.g. an antibody comprising a light chain comprising a V_{L} and C_{L} and a heavy chain comprising V_{H}, CH₁, CH₂ and CH₃) which binds hPD-L1 (optionally wherein the antibody has a structure as defined in any one of concepts 1 to 40, or wherein the antibody has a sequence—including CDRs and variable regions—as defined in Aspect 1a hereinbelow) and a Fab which binds CD137 (optionally wherein the CD137 Fab has a sequence—including CDRs and variable regions—as defined in Aspect 1a hereinbelow). In one embodiment, the bispecific antibody has a FIT-Ig format which comprises a full antibody (e.g. an antibody comprising a light chain comprising a V_{L} and C_{L} and a heavy chain comprising V_{H}, CH₁, CH₂ and CH₃) which binds CD137 (optionally wherein the CD137 antibody has a sequence—including CDRs and variable regions—as defined in Aspect 1a hereinbelow) and a Fab which binds hPD-L1 (optionally wherein the antibody has a structure as defined in any one of concepts 1 to 40, or wherein the antibody has a sequence—including CDRs and variable regions—as defined in Aspect 1a hereinbelow). In one embodiment, the FIT-Ig is effector-enabled (e.g. as described in any of concepts 30 to 32). In another embodiment, the FIT-Ig is effector-disabled (e.g. is an IgG4 format, or as described in any of concepts 30 or 31).

[0681] In one embodiment, the bispecific antibody has a FIT-Ig format which comprises a full antibody (e.g. an antibody comprising a light chain comprising a V_{L} and C_{L} and a heavy chain comprising V_{H}, CH₁, CH₂ and CH₃) which binds hPD-L1 (optionally wherein the antibody has a structure as defined in any one of concepts 1 to 40, or wherein the antibody has a sequence—including CDRs and variable regions—as defined in Aspect 1a hereinbelow) and a Fab which binds CD3 (optionally wherein the CD3 Fab has a sequence—including CDRs and variable regions—as defined in Aspect 1a hereinbelow). In one embodiment, the bispecific antibody has a FIT-Ig format which comprises a full antibody (e.g. an antibody comprising a light chain comprising a V_{L} and C_{L} and a heavy chain comprising V_{H}, CH₁, CH₂ and CH₃) which binds CD3 (optionally wherein the CD3 antibody has a sequence—including CDRs and variable regions—as defined in Aspect 1a hereinbelow) and a Fab which binds hPD-L1 (optionally wherein the antibody has a structure as defined in any one of concepts 1 to 40, or wherein the antibody has a sequence—including CDRs and variable regions—as defined in Aspect 1a hereinbelow). In one embodiment, the FIT-Ig is effector-enabled (e.g. as described in any of concepts 30 to 32). In another embodiment, the FIT-Ig is effector-disabled (e.g. is an IgG4 format, or as described in any of concepts 30 or 31).

[0682] Any of the targets listed above (and the Fabs and/or full antibodies described in more detail in Aspect 1A or anti-TIGIT antibodies described below) may be applied to the FIT-Ig structure.

Concept 40. The bispecific antibody according to concept 39, wherein the another target antigen is TIGIT or LAG3.

[0683] In any of concepts 37 to 40, if the antibody or fragment thereof has the heavy and light variable region sequences of 84G09, then the bispecific antibody shall be interpreted as not including a mAb² format wherein the Fcab has binding affinity to LAG3.

[0684] In one embodiment, the bispecific antibody has a FIT-Ig format which comprises a full antibody (e.g. an antibody comprising a light chain comprising a V_{L} and C_{L} and a heavy chain comprising V_{H}, CH₁, CH₂ and CH₃) which binds hPD-L1 (optionally wherein the antibody has a structure as defined in any one of concepts 1 to 40, or wherein the antibody has a sequence—including CDRs and variable regions—as defined in Aspect 1a hereinbelow) and a Fab which binds TIGIT (optionally wherein the TIGIT Fab has a sequence—including CDRs and variable regions—as defined in Aspect 1a hereinbelow). In one embodiment, the bispecific antibody has a FIT-Ig format which comprises a full antibody (e.g. an antibody comprising a light chain comprising a V_{L} and C_{L} and a heavy chain comprising V_{H}, CHI, CH₂ and CH₃) which binds TIGIT (optionally wherein the TIGIT antibody has a sequence—including CDRs and variable regions—as defined in Aspect 1a hereinbelow) and a Fab which binds hPD-L1 (optionally wherein the antibody has a structure as defined in any one of concepts 1 to 40, or wherein the antibody has a sequence—including CDRs and variable regions—as defined in Aspect 1a hereinbelow). In one embodiment, the FIT-Ig is effector-enabled (e.g. as described in any of concepts 30 to 32). In another embodiment, the FIT-Ig is effector-disabled (e.g. is an IgG4 format, or as described in any of concepts 30 or 31).

[0685] In one embodiment, the bispecific antibody has a FIT-Ig format which comprises a full antibody (e.g. an antibody comprising a light chain comprising a V_{L} and C_{L} and a heavy chain comprising V_{H}, CH₁, CH₂ and CH₃) which binds hPD-L1 (optionally wherein the antibody has a structure as defined in any one of concepts 1 to 40, or wherein the antibody has a sequence—including CDRs and variable regions—as defined in Aspect 1a hereinbelow) and a Fab which binds LAG3 (optionally wherein the LAG3 Fab has a sequence—including CDRs and variable regions—as defined in Aspect 1a hereinbelow). In one embodiment, the bispecific antibody has a FIT-Ig format which comprises a full antibody (e.g. an antibody comprising a light chain comprising a V_{L} and C_{L} and a heavy chain comprising V_{H}, CH₁, CH₂ and CH₃) which binds LAG3 (optionally wherein the LAG3 antibody has a sequence—including CDRs and variable regions—as defined in Aspect 1a hereinbelow) and a Fab which binds hPD-L1 (optionally wherein the antibody has a structure as defined in any one of concepts 1 to 40, or wherein the antibody has a sequence—including CDRs and variable regions—as defined in Aspect 1a hereinbelow). In one embodiment, the FIT-Ig is effector-enabled (e.g. as described in any of concepts 30 to 32). In another embodiment, the FIT-Ig is effector-disabled (e.g. is an IgG4 format, or as described in any of concepts 30 or 31).

Concept 41. An antibody or fragment as defined in any preceding concept for use in treating or preventing a hPD-L1-mediated disease or condition, e.g. selected from neoplastic or non-neoplastic disease, chronic viral infections, and malignant tumours, such as melanoma, Merkel cell carcinoma, non-small cell lung cancer (squamous and non-squamous), renal cell cancer, bladder cancer, head and neck squamous cell carcinoma, mesothelioma, virally induced cancers (such as cervical cancer and nasopharyngeal cancer), soft tissue sarcomas, haematological malignancies such as Hodgkin's and non-Hodgkin's disease and diffuse large B-cell lymphoma). (for example melanoma, Merkel cell carcinoma, non-small cell lung cancer (squamous and non-squamous), renal cell cancer, bladder cancer, head and neck squamous cell carcinoma and mesothelioma or for example virally induced cancers (such as cervical cancer and nasopharyngeal cancer) and soft tissue sarcomas).
Concept 42. Use of an antibody or fragment as defined in any one of concepts 1 to 40 in the manufacture of a medicament for administration to a human for treating or preventing a hPD-L1 mediated disease or condition in the human, e.g. selected from neoplastic or non-neoplastic disease, chronic viral infections, and malignant tumours, such as melanoma, Merkel cell carcinoma, non-small cell lung cancer (squamous and non-squamous), renal cell cancer, bladder cancer, head and neck squamous cell carcinoma, mesothelioma, virally induced cancers (such as cervical cancer and nasopharyngeal cancer), soft tissue sarcomas, haematological malignancies such as Hodgkin's and non-Hodgkin's disease and diffuse large B-cell lymphoma (for example melanoma, Merkel cell carcinoma, non-small cell lung cancer (squamous and non-squamous), renal cell cancer, bladder cancer, head and neck squamous cell carcinoma and mesothelioma or for example virally induced cancers (such as cervical cancer and nasopharyngeal cancer) and soft tissue sarcomas).
Concept 43. A method of treating or preventing a hPD-L1 mediated disease or condition, e.g. selected from neoplastic or non-neoplastic disease, chronic viral infections, and malignant tumours, such as melanoma, Merkel cell carcinoma, non-small cell lung cancer (squamous and non-squamous), renal cell cancer, bladder cancer, head and neck squamous cell carcinoma, mesothelioma, virally induced cancers (such as cervical cancer and nasopharyngeal cancer), soft tissue sarcomas, haematological malignancies such as Hodgkin's and non-Hodgkin's disease and diffuse large B-cell lymphoma (for example melanoma, Merkel cell carcinoma, non-small cell lung cancer (squamous and non-squamous), renal cell cancer, bladder cancer, head and neck squamous cell carcinoma and mesothelioma or for example virally induced cancers (such as cervical cancer and nasopharyngeal cancer) and soft tissue sarcomas) in a human, comprising administering to said human a therapeutically effective amount of an antibody or fragment as defined in any one of concepts 1 to 40, wherein the hPD-L1 mediated disease or condition is thereby treated or prevented.

[0686] In any of concepts 41 to 43, the hPD-L1 mediated disease may be any of those as described herein. In one embodiment, in any of concepts 41 to 43, the hPD-L1 mediated disease is a virally induced cancer, such as cervical cancer and nasopharyngeal cancer, for example cervical cancers caused by HPV infection. In one embodiment, in any of concepts 41 to 43, the hPD-L1 mediated disease is a chronic viral infection. In one embodiment, in any of concepts 41 to 43, the hPD-L1 mediated disease is a neoplastic disease. In one embodiment, in any of concepts 41 to 43, the hPD-L1 mediated disease is a non-neoplastic disease. In one embodiment, in any of concepts 41 to 43, the hPD-L1 mediated disease is a malignant tumour. In one embodiment, in any of concepts 41 to 43, the hPD-L1 mediated disease is a cancer which is known to be responsive to PD-L1 therapy, such as melanoma, Merkel cell carcinoma, non-small cell lung cancer (squamous and non-squamous), renal cell cancer, bladder cancer, head and neck squamous cell carcinoma, mesothelioma. In one embodiment, in any of concepts 41 to 43, the hPD-L1 mediated disease is a cancer which is a soft tissue sarcoma.

Concept 44. The antibody or fragment according to concept 41, the use according to concept 42 or the method according to concept 43, wherein the hPD-L1-mediated disease or condition is cancer. Concept 44a. The antibody or fragment according to concept 41, the use according to concept 42 or the method according to concept 43, wherein the hPD-L1-mediated disease or condition is a neurodegenerative disease, disorder or condition, optionally wherein the neurodegenerative disease, disorder or condition is selected from Alzheimer's disease, amyotrophic lateral sclerosis, Parkinson's disease, Huntington's disease, primary progressive multiple sclerosis, secondary progressive multiple sclerosis, corticobasal degeneration, Rett syndrome, a retinal degeneration disorder selected from age-related macular degeneration and retinitis pigmentosa; anterior ischemic optic neuropathy, glaucoma, uveitis, depression, trauma-associated stress or post-traumatic stress disorder, frontotemporal dementia, Lewy body dementias, mild cognitive impairments, posterior cortical atrophy, primary progressive aphasia and progressive supranuclear palsy or aged-related dementia, in particular Alzheimer's disease, amyotrophic lateral sclerosis, Parkinson's disease and Huntington's disease, and e.g. Alzheimer's disease.

[0687] In concept 44a, the therapeutically effective amount of an antibody or fragment may comprise an antigen-binding site that specifically binds PD-L1, e.g. hPD-L1.

[0688] In one embodiment, the antigen-binding site specifically binds PD-L1, e.g. hPD-L1. In one embodiment, the PD-L1 antigen-binding site comprises the CDRH1, CDRH2, CDR3, CDRL1, CDRL2 and CDRL3, or the V_{H}, or the V_{L} or the V_{H} and V_{L} region from any one of the anti-PD-L1 antibodies selected from atezolizumab (Roche), avelumab (Merck), BMS-936559/MDX-1105 (BMS), durvalumab/Medi4736 (Medimmune), KN-035, CA-170, FAZ-053 M7824, ABBV-368, LY-3300054, GNS-1480, YW243.55.S70, REGN3504 and any of the PD-L1 antibodies disclosed in WO2017/034916, WO2017/020291, WO2017/020858, WO2017/020801, WO2016/111645, WO2016/197367, WO2016/061142, WO2016/149201, WO2016/000619, WO2016/160792, WO2016/022630, WO2016/007235, WO2015/179654, WO2015/173267, WO2015/181342, WO2015/109124, WO2015/112805, WO2015/061668, WO2014/159562, WO2014/165082, WO2014/100079, WO2014/055897, WO2013/181634, WO2013/173223, WO2013/079174, WO2012/145493, WO2011/066389, WO2010/077634, WO2010/036959, WO2010/089411 or WO2007/005874, which antibodies and sequences are incorporated herein by reference.

[0689] In another embodiment of concept 44a, the PD-L1 antigen-binding site comprises the CDRH1, CDRH2, CDR3, CDRL1, CDRL2 and CDRL3, or the V_{H}, or the V_{L} or the V_{H} and V_{L} region from any one of the anti-PD-L1 antibodies selected from an anti-PD-L1 antibody disclosed herein, particularly the anti-PD-L1 antibody clones disclosed in concepts 16a through 16l, and more particularly anti-PD-L1 antibody clone 84G09.

[0690] In another embodiment of concept 44a, the PD-L1 antigen-binding site comprises the CDRH1, CDRH2, CDR3, CDRL1, CDRL2 and CDRL3, or the V_{H}, or the V_{L} or the V_{H} and V_{L} region from anti-PD-L1 antibody clone 84G09 and the hPD-L1-mediated disease or condition is Alzheimer's disease.

Concept 45. The antibody or fragment, the use or the method according to concept 44, wherein the cancer is selected from melanoma, Merkel cell carcinoma, non-small cell lung cancer (squamous and non-squamous), renal cell cancer, bladder cancer, head and neck squamous cell carcinoma and mesothelioma or is selected from virally induced cancers (such as cervical cancer and nasopharyngeal cancer) and soft tissue sarcomas.
Concept 46. The antibody or fragment, use or the method according to any one of concepts 41 to 45, further comprising administering to the human a further therapy, for example a further therapeutic agent, optionally wherein the further therapeutic agent is independently selected from the group consisting of:
[0691] a. other immune checkpoint inhibitors (such as anti-TIM-3 antibodies, anti-CTLA-4 antibodies, anti-TIGIT antibodies and anti-LAG-3 antibodies);
[0692] b. immune stimulators (such as anti-OX40 antibodies, anti-GITR antibodies, anti-CD137 antibodies, anti-ICOS antibodies and anti-CD40 antibodies);
[0693] c. chemokine receptor antagonists (such as CXCR4, CCR4 and CXCR2);
[0694] d. targeted kinase inhibitors (such as CSF-1R or VEGFR inhibitors);
[0695] e. angiogenesis inhibitors (such as anti-VEGF-A or Delta-like Ligand-4);
[0696] f. immune stimulating peptides or chemokines (such as CXCL9 or CXCL10);
[0697] g. cytokines (such as IL-15 and IL-21);
[0698] h. bispecific T-cell engagers (BiTEs) having at least one specificity against CD3 (e.g. CD3/CD19 BiTE);
[0699] i. other bi-specific molecules (for example IL-15-containing molecules targeted towards tumour associated antigens, for example Epidermal growth factor receptors such as EGFR, Her-2, New York Esophageal Cancer-1 (NY-ESO-1), GD2, EpCAM or Melanoma Associated Antigen-3 (MAGE-A3));
[0700] j. oncolytic viruses (such as HSV virus (optionally which secretes GMCSF), Newcastle disease virus and Vaccinia virus);
[0701] k. vaccination with tumour associated antigens (such as New York Esophageal Cancer-1 [NY-ESO-1], Melanoma Associated Antigen-3 [MAGE-3]);
[0702] l. cell-based therapies (such as chimeric Antigen Receptor-T-cells (CAR-T) for example expressing anti-CD19, anti-EpCam or anti-mesothelin);
[0703] m. bi-specific NK cell engagers having a specificity against an activating MK receptor such as NKG2D or CD16a; and
[0704] n. adoptive transfer of tumour specific T-cells or LAK cells,
   or optionally wherein the further therapy is chemotherapy, radiotherapy and surgical removal of tumours.

[0705] Radiotherapy may be single dose or in fractionated doses, either delivered to affected tissues directly or to the whole body.

[0706] Chemotherapeutic agents may any as described hereinabove, in particular, agents that induce immunogenic cell death, for example platinum therapies, such as oxaliplatin. In one embodiment, the chemotherapy is a standard of care cytotoxic chemotherapy for the cancer being treated.

[0707] In this aspect, the bispecific molecules include “bispecific antibodies” and antibody fusion proteins, including those formats and molecules described in concepts 37 to 40.

[0708] The antibodies may be any of the sequences or antibodies described in arrangement 5, 5a or detailed in Aspect 1a.

[0709] The further therapeutic agents of this concept may be delivered by any method, which methods are well-known to those skilled in the art. For example, the further therapeutic agents may be delivered orally, systemically or locally (to the tumour environment). In one embodiment, the further therapeutic agent is delivered orally. In one embodiment, the further therapeutic agent is delivered systemically (e.g. intravenously). In one embodiment, the further therapeutic agent is delivered locally to the tumour environment.

[0710] Compositions and routes of administration are described in more detail hereinbelow.

Concept 47. The antibody or fragment, use or the method according to concept 46, wherein the further therapeutic agent is administered sequentially or simultaneously with the anti-hPD-L1 antibody or fragment.
Concept 48. A pharmaceutical composition comprising an antibody of fragment as defined in any one of concepts 1 to 40 and a pharmaceutically acceptable excipient, diluent or carrier and optionally further comprising a further therapeutic agent independently selected from the group consisting of:
[0711] a) other immune checkpoint inhibitors (such as anti-TIM-3 antibodies, anti-CTLA-4 antibodies, anti-TIGIT antibodies and anti-LAG-3 antibodies);
[0712] b) immune stimulators (such as anti-OX40 antibodies, anti-GITR antibodies, anti-CD137 antibodies, anti-ICOS antibodies and anti-CD40 antibodies);
[0713] c) chemokine receptor antagonists (such as CXCR4, CCR4 and CXCR2);
[0714] d) targeted kinase inhibitors (such as CSF-1R or VEGFR inhibitors);
[0715] e) angiogenesis inhibitors (such as anti-VEGF-A or Delta-like Ligand-4);
[0716] f) immune stimulating peptides or chemokines (such as CXCL9 or CXCL10);
[0717] g) cytokines (such as IL-15 and IL-21);
[0718] h) bispecific T-cell engagers (BiTEs) having at least one specificity against CD3 (e.g. CD3/CD19 BiTE);
[0719] i) other bi-specific molecules (for example IL-15-containing molecules targeted towards tumour associated antigens, for example Epidermal growth factor receptors such as EGFR, Her-2, New York Esophageal Cancer-1 (NY-ESO-1), GD2, EpCAM or Melanoma Associated Antigen-3 (MAGE-A3));
[0720] j) oncolytic viruses (such as HSV virus (optionally which secretes GMCSF), Newcastle disease virus and Vaccinia virus);
[0721] k) vaccination with tumour associated antigens (such as New York Esophageal Cancer-1 [NY-ESO-1], Melanoma Associated Antigen-3 [MAGE-3]);
[0722] l) cell-based therapies (such as chimeric Antigen Receptor-T-cells (CAR-T) for example expressing anti-CD19, anti-EpCam or anti-mesothelin);
[0723] m) bi-specific NK cell engagers having a specificity against an activating MK receptor such as NKG2D or CD16a; and
[0724] n) adoptive transfer of tumour specific T-cells or LAK cells.

[0725] Pharmaceutical formulations are well-known to those skilled in the art. In one embodiment, the antibody or fragment is administered intravenously. In one embodiment, the antibody or fragment is administered subcutaneously.

[0726] In an example, an antibody or fragment as disclosed herein is contained in a medical container, e.g. a vial, syringe, IV container or an injection device (such as an intraocular or intravitreal injection device). In an example, the antibody or fragment is in vitro, for example, in a sterile container.

[0727] In one embodiment, the composition is formulated in accordance with routine procedures as a pharmaceutical composition adapted for intravenous administration to human beings. Typically, compositions for intravenous administration are solutions in sterile isotonic aqueous buffer. Where necessary, the composition may also include a solubilizing agent and a local anesthetic such as lignocamne to ease pain at the site of the injection. Such compositions, however, may be administered by a route other than intravenous.

[0728] Generally, the ingredients of compositions are supplied either separately or mixed together in unit dosage form, for example, as a dry lyophilized powder or water free concentrate in a hermetically sealed container such as an ampoule or sachette indicating the quantity of active agent. Where the composition is to be administered by infusion, it can be dispensed with an infusion bottle containing sterile pharmaceutical grade water or saline. Where the composition is administered by injection, an ampoule of sterile water for injection or saline can be provided so that the ingredients may be mixed prior to administration.

[0729] In this aspect, the bispecific molecules include “bispecific antibodies” and antibody fusion proteins, including those formats and molecules described in concepts 37 to 40.

[0730] The further therapeutic agents of this concept may be delivered by any method, which methods are well-known to those skilled in the art. For example, the further therapeutic agents may be delivered orally, systemically or locally (to the tumour environment). In one embodiment, the further therapeutic agent is delivered orally. In one embodiment, the further therapeutic agent is delivered systemically (e.g. intravenously). In one embodiment, the further therapeutic agent is delivered locally to the tumour environment.

[0731] The antibodies may have any of the sequences or may be any of the antibodies described in arrangement 5, 5a or detailed in aspect 1a.

Concept 49. A pharmaceutical composition according to concept 48, or a kit comprising a pharmaceutical composition as defined in concept 48, wherein the composition is for treating and/or preventing a hPD-L1-mediated condition or disease, e.g. selected from neoplastic or non-neoplastic disease, chronic viral infections, and malignant tumours, such as melanoma, Merkel cell carcinoma, non-small cell lung cancer (squamous and non-squamous), renal cell cancer, bladder cancer, head and neck squamous cell carcinoma, mesothelioma, virally induced cancers (such as cervical cancer and nasopharyngeal cancer), soft tissue sarcomas, haematological malignancies such as Hodgkin's and non-Hodgkin's disease, diffuse large B-cell lymphoma.
Concept 50. A pharmaceutical composition according to concept 48 or concept 49 in combination with, or kit according to concept 49 comprising, a label or instructions for use to treat and/or prevent said disease or condition in a human; optionally wherein the label or instructions comprise a marketing authorisation number (e.g. an FDA or EMA authorisation number); optionally wherein the kit comprises an IV or injection device that comprises the antibody or fragment.
Concept 51. A method of modulating PD-1/PD-L1 interaction in a patient, comprising administering an effective amount of an antibody or fragment as defined in any one of concepts 1 to 40 to said patient.

[0732] In another embodiment, there is provided a method of modulating CD80/PD-L1 interaction in a patient, comprising administering an effective amount of an antibody or fragment as defined in any one of concepts 1 to 40 to said patient. In another embodiment, the antibody or fragment modulates CD80/PD-L1 interaction, but does not modulate PD-1/PD-L1 interaction. In another embodiment, the antibody or fragment blocks CD80/PD-L1 interaction, but does not block PD-1/PD-L1 interaction. In another embodiment, the antibody or fragment inhibits CD80/PD-L1 interaction, but does not inhibit PD-1/PD-L1 interaction.

Concept 52. A method of inhibiting PD-L1 activity in a patient, comprising administering an effective amount of an antibody or fragment as defined in any one of concepts 1 to 40 to said patient.

[0733] In one embodiment, the antibody or fragment blocks or inhibits PD-1 binding to PD-L1. In one embodiment, the antibody or fragment blocks or inhibits CD80 binding to PD-L1.

Concept 53. A method of treating a proliferative disease in an animal (e.g. a human), comprising administering an effective amount of an antibody or fragment as defined in any one of concepts 1 to 40 to said patient.

[0734] Proliferative diseases may be any as described elsewhere herein.

Concept 54. A method of detecting PD-L1 expression in a sample, comprising contacting the sample with an antibody or fragment as defined in any one of concepts 1 to 40.
Concept 55. A method comprising contacting a biological sample with an antibody or fragment as defined in any one of concepts 1 to 40 to form a complex with PD-L1 present in the sample and measuring the presence, absence or level of the complex in the biological sample.
Concept 56. The method according to concept 55, wherein the presence, absence and/or level of PD-L1 expression is detected prior to treatment and a high level of surface expressed PD-L1 is indicative of successful treatment.
Concept 57. The method according to concept 55, wherein the presence, absence and/or level of PD-L1 expression is detected during treatment as an early response biomarker.
Concept 58. The method according to concept 55 or concept 57, wherein the presence, absence and/or level of PD-L1 expression is detected during or after treatment to help determine one or more of: whether treatment has been successful, whether treatment should continue, and/or whether treatment should be modified.
Concept 59. The method according to any one of concepts 55 to 58, wherein therapy comprises treatment with an anti-PD-L1 antibody, optionally as defined in any one of concepts 1 to 40.
Concept 60. A method for monitoring therapy efficacy, the method comprising detecting expression of surface expressed PD-L1 in a patient prior to therapy, and during or after therapy, wherein an antibody or fragment as defined in any one of concepts 1 to 40 is used to detect expression of surface expressed PD-L1.
Concept 61. The method according to concept 60, wherein surface expressed PD-L1 expression is detected in vivo.
Concept 62. The method according to concept 60, wherein surface expressed PD-L1 expression is detected in a tissue sample in vitro.
Concept 63. A method for identifying binding partners for PD-L1, the method comprising immunoprecipitating an intact protein complex comprising PD-L1 using an antibody or fragment as defined in any one of concepts 1 to 40.
Concept 64. A method of diagnosing a disease in a human subject associated with altered PD-L1 expression comprising the steps of contacting a biological sample from the human subject with an antibody as defined in concepts 1 to 40 to form a complex between the antibody and PD-L1 present in the sample; and detecting the amount of the complex.
Concept 65. A nucleic acid that encodes the CDRH3 of an antibody or fragment as defined in any one of concepts 1 to 40.
Concept 65a. There is also provided a nucleic acid that encodes the CDRH2 of an antibody or fragment as defined in any one of concepts 1 to 40.
Concept 65b. There is also provided a nucleic acid that encodes the CDRH1 of an antibody or fragment as defined in any one of concepts 1 to 40.
Concept 65c. There is also provided a nucleic acid that encodes the CDRL1 of an antibody or fragment as defined in any one of concepts 1 to 40.
Concept 65d. There is also provided a nucleic acid that encodes the CDRL2 of an antibody or fragment as defined in any one of concepts 1 to 40.
Concept 65e. There is also provided a nucleic acid that encodes the CDRL3 of an antibody or fragment as defined in any one of concepts 1 to 40.

[0735] In one embodiment, the nucleic acid is an isolated and purified nucleic acid.

Concept 66. A nucleic acid that encodes a V_{H} domain and/or a V_{L} domain of an antibody or fragment as defined in any one of concepts 1 to 40.

[0736] The V_{H} and V_{L} domain nucleic acid sequences of the invention are provided in the sequence listing. In one embodiment, the nucleic acid sequence is at least 70% identical to the specified Seq ID No. In one embodiment, the nucleic acid sequence is at least 75% identical to the specified Seq ID No. In one embodiment, the nucleic acid sequence is at least 95% identical to the specified Seq ID No. In one embodiment, the nucleic acid sequence is at least 96% identical to the specified Seq ID No. In one embodiment, the nucleic acid sequence is at least 97% identical to the specified Seq ID No. In one embodiment, the nucleic acid sequence is at least 98% identical to the specified Seq ID No. In one embodiment, the nucleic acid sequence is at least 99% identical to the specified Seq ID No. In one embodiment, the nucleic acid sequence is at least 99.5% identical to the specified Seq ID No.

Concept 67. The nucleic acid according to concept 66 comprising a nucleotide sequence that is at least 80% identical to the sequence of SEQ ID NO:36 and/or SEQ ID NO:46.

[0737] Concept 67a. A nucleic acid according to concept 66 comprising a nucleotide sequence that is at least 80% identical to the sequence of SEQ ID NO:16 and/or SEQ ID NO:26.

[0738] Concept 67b. A nucleic acid according to concept 66 comprising a nucleotide sequence that is at least 80% identical to the sequence of SEQ ID NO:61 and/or SEQ ID NO:71.

[0739] Concept 67c. A nucleic acid according to concept 66 comprising a nucleotide sequence that is at least 80% identical to the sequence of SEQ ID NO:81 and/or SEQ ID NO:91.

[0740] Concept 67d. A nucleic acid according to concept 66 comprising a nucleotide sequence that is at least 80% identical to the sequence of SEQ ID NO:101 and/or SEQ ID NO:111.

[0741] Concept 67e. A nucleic acid according to concept 66 comprising a nucleotide sequence that is at least 80% identical to the sequence of SEQ ID NO:121 and/or SEQ ID NO:131.

[0742] Concept 67f. A nucleic acid according to concept 66 comprising a nucleotide sequence that is at least 80% identical to the sequence of SEQ ID NO:161 and/or SEQ ID NO:171.

[0743] Concept 67g. A nucleic acid according to concept 66 comprising a nucleotide sequence that is at least 80% identical to the sequence of SEQ ID NO:181 and/or SEQ ID NO:191.

[0744] Concept 67h. A nucleic acid according to concept 66 comprising a nucleotide sequence that is at least 80% identical to the sequence of SEQ ID NO:141 and/or SEQ ID NO:151.

[0745] Concept 67i. A nucleic acid according to concept 66 comprising a nucleotide sequence that is at least 80% identical to the sequence of SEQ ID NO:247 and/or SEQ ID NO:257.

[0746] Concept 67j. A nucleic acid according to concept 66 comprising a nucleotide sequence that is at least 80% identical to the sequence of SEQ ID NO:267 and/or SEQ ID NO:277.

[0747] Concept 67k. A nucleic acid according to concept 66 comprising a nucleotide sequence that is at least 80% identical to the sequence of SEQ ID NO:287 and/or SEQ ID NO:297.

[0748] Concept 67l. A nucleic acid according to concept 66 comprising a nucleotide sequence that is at least 80% identical to the sequence of SEQ ID NO:352 and/or SEQ ID NO:362.

[0749] In one embodiment, the nucleic acid sequence is at least 70% identical to the specified Seq ID No. In one embodiment, the nucleic acid sequence is at least 75% identical to the specified Seq ID No. In one embodiment, the nucleic acid sequence is at least 95% identical to the specified Seq ID No. In one embodiment, the nucleic acid sequence is at least 96% identical to the specified Seq ID No. In one embodiment, the nucleic acid sequence is at least 97% identical to the specified Seq ID No. In one embodiment, the nucleic acid sequence is at least 98% identical to the specified Seq ID No. In one embodiment, the nucleic acid sequence is at least 99% identical to the specified Seq ID No. In one embodiment, the nucleic acid sequence is at least 99.5% identical to the specified Seq ID No.

Concept 68. A nucleic acid that encodes a heavy chain or a light chain of an antibody as defined in any one of concepts 1 to 40.
Concept 69. A vector comprising the nucleic acid of any one of concepts 65 to 68; optionally wherein the vector is a CHO or HEK293 vector.
Concept 70. A host comprising the nucleic acid of any one of concepts 65 to 68 or the vector of concept 69.

### 3. Immunocytokines

[0750] The inventors have described immunocytokines which comprise an antibody which binds to an immune checkpoint inhibitor, such as PD-L1 fused to either the N-terminus or C-terminus of the heavy chain or the light chain (for example, the C-terminus of the heavy or light chain, and in particular the light chain). The immunocytokines comprise a cytokine molecule, which may be IL-2 or a variant thereof (including variant having a 1 to 10 amino acid deletion at the N-terminus). The antibodies as described hereinabove may be used in any immunocytokine described herein.

[0751] Without being bound by theory, immunocytokines of the invention may provide one or more of the following advantageous properties:
[0752] synergistic activity (by virtue of the therapeutic activity of antibody Fab portion in combination with the cytokine)
[0753] improved tumour targeting
[0754] ability to retain effector functions such as CDC, ADCC and/or ADCP
[0755] reduced off-target effects
[0756] reduced toxicity (e.g. compared to free cytokine or cytokine when fused to the heavy chain of an immunocytokine)
[0757] reduced immunogenicity
[0758] lower dose/frequency of dosing, in particular due to improved half life of light chain cytokine fusions as compared to heavy chain fusion equivalents
[0759] Specificity for blocking only one of the ligands of PD-L1 (e.g. blocks CD80/PD-L1 interaction, but not PD-1/PD-L1 interaction)
[0760] Solubility
[0761] Stability
[0762] Ease of formulation
[0763] Frequency of dosing and/or route of administration
[0764] Manufacturability (e.g. expression, ease of purification, isoforms)

[0765] 1D05 ICK comprises a heavy chain amino acid sequence of Seq ID No:299, and a light chain amino acid sequence of Seq ID No:300. The light chain comprises a V_{L} domain comprising the CDRs and V_{L} sequence of antibody 1D05 described hereinabove, fused at the heavy chain to full length, wild-type, human IL-2 cytokine. It does not contain a linker peptide. The heavy chain comprises a V_{H} domain comprising the CDRs and V_{H} sequence of antibody 1D05 described hereinabove, fused to a disabled IgG constant region (Seq ID No:205).

[0766] 1D05 D5-9 ICK comprises a heavy chain comprising a V_{H} region amino acid sequence of Seq ID No:33 (comprising the CDRs of 1D05 as described hereinabove) fused to a disabled IgG1 constant region with an amino acid sequence of Seq ID No:205. The light chain comprises a V_{L} amino acid sequence of Seq ID No:43 (comprising the CDRs of 1D05 as described hereinabove) directly fused at the C-terminus to IL-2 D5-9 (Seq ID No:303), which is directly fused to amino acids 21 to 133 of hIL-2 (Seq ID No:324).

[0767] 1D05 D1-9 ICK comprises a heavy chain comprising a V_{H} region amino acid sequence of Seq ID No:33 (comprising the CDRs of 1D05 as described hereinabove) fused to a disabled IgG1 constant region with an amino acid sequence of Seq ID No:205. The light chain comprises a V_{L} amino acid sequence of Seq ID No:43 (comprising the CDRs of 1D05 as described hereinabove) directly fused at the C-terminus to IL-2 D1-9 (Seq ID No:304), which is directly fused to amino acids 21 to 133 of hIL-2 (Seq ID No:324).

[0768] 1D05 D5-7 ICK comprises a heavy chain comprising a V_{H} region amino acid sequence of Seq ID No:33 (comprising the CDRs of 1D05 as described hereinabove) fused to a disabled IgG1 constant region with an amino acid sequence of Seq ID No:205. The light chain comprises a V_{L} amino acid sequence of Seq ID No:43 (comprising the CDRs of 1D05 as described hereinabove) directly fused at the C-terminus to IL-2 D5-7 (Seq ID No:305), which is directly fused to amino acids 21 to 133 of hIL-2 (Seq ID No:324).

[0769] 1D05 D1 ICK comprises a heavy chain comprising a V_{H} region amino acid sequence of Seq ID No:33 (comprising the CDRs of 1D05 as described hereinabove) fused to a disabled IgG1 constant region with an amino acid sequence of Seq ID No:205. The light chain comprises a V_{L} amino acid sequence of Seq ID No:43 (comprising the CDRs of 1D05 as described hereinabove) directly fused at the C-terminus to IL-2 D1 (Seq ID No:306), which is directly fused to amino acids 21 to 133 of hIL-2 (Seq ID No:324).

[0770] 1D05 D1-2 ICK comprises a heavy chain comprising a V_{H} region amino acid sequence of Seq ID No:33 (comprising the CDRs of 1D05 as described hereinabove) fused to a disabled IgG1 constant region with an amino acid sequence of Seq ID No:205. The light chain comprises a V_{L} amino acid sequence of Seq ID No:43 (comprising the CDRs of 1D05 as described hereinabove) directly fused at the C-terminus to IL-2 D1-2 (Seq ID No:307), which is directly fused to amino acids 21 to 133 of hIL-2 (Seq ID No:324).

[0771] 1D05 D1-3 ICK comprises a heavy chain comprising a V_{H} region amino acid sequence of Seq ID No:33 (comprising the CDRs of 1D05 as described hereinabove) fused to a disabled IgG1 constant region with an amino acid sequence of Seq ID No:205. The light chain comprises a V_{L} amino acid sequence of Seq ID No:43 (comprising the CDRs of 1D05 as described hereinabove) directly fused at the C-terminus to IL-2 D1-3 (Seq ID No:308), which is directly fused to amino acids 21 to 133 of hIL-2 (Seq ID No:324).

[0772] 1D05 D1-4 ICK comprises a heavy chain comprising a V_{H} region amino acid sequence of Seq ID No:33 (comprising the CDRs of 1D05 as described hereinabove) fused to a disabled IgG1 constant region with an amino acid sequence of Seq ID No:205. The light chain comprises a V_{L} amino acid sequence of Seq ID No:43 (comprising the CDRs of 1D05 as described hereinabove) directly fused at the C-terminus to IL-2 D1-4 (Seq ID No:309), which is directly fused to amino acids 21 to 133 of hIL-2 (Seq ID No:324).

[0773] 1D05 D1-5 ICK comprises a heavy chain comprising a V_{H} region amino acid sequence of Seq ID No:33 (comprising the CDRs of 1D05 as described hereinabove) fused to a disabled IgG1 constant region with an amino acid sequence of Seq ID No:205. The light chain comprises a V_{L} amino acid sequence of Seq ID No:43 (comprising the CDRs of 1D05 as described hereinabove) directly fused at the C-terminus to IL-2 D1-5 (Seq ID No:310), which is directly fused to amino acids 21 to 133 of hIL-2 (Seq ID No:324).

[0774] 1D05 D1-6 ICK comprises a heavy chain comprising a V_{H} region amino acid sequence of Seq ID No:33 (comprising the CDRs of 1D05 as described hereinabove) fused to a disabled IgG1 constant region with an amino acid sequence of Seq ID No:205. The light chain comprises a V_{L} amino acid sequence of Seq ID No:43 (comprising the CDRs of 1D05 as described hereinabove) directly fused at the C-terminus to IL-2 D1-6 (Seq ID No:311), which is directly fused to amino acids 21 to 133 of hIL-2 (Seq ID No:324).

[0775] 1D05 D1-7 ICK comprises a heavy chain comprising a V_{H} region amino acid sequence of Seq ID No:33 (comprising the CDRs of 1D05 as described hereinabove) fused to a disabled IgG1 constant region with an amino acid sequence of Seq ID No:205. The light chain comprises a V_{L} amino acid sequence of Seq ID No:43 (comprising the CDRs of 1D05 as described hereinabove) directly fused at the C-terminus to IL-2 D1-7 (Seq ID No:312), which is directly fused to amino acids 21 to 133 of hIL-2 (Seq ID No:324).

[0776] 1D05 D1-8 ICK comprises a heavy chain comprising a V_{H} region amino acid sequence of Seq ID No:33 (comprising the CDRs of 1D05 as described hereinabove) fused to a disabled IgG1 constant region with an amino acid sequence of Seq ID No:205. The light chain comprises a V_{L} amino acid sequence of Seq ID No:43 (comprising the CDRs of 1D05 as described hereinabove) directly fused at the C-terminus to IL-2 D1-8 (Seq ID No:313), which is directly fused to amino acids 21 to 133 of hIL-2 (Seq ID No:324).

[0777] 1D05 D9 ICK comprises a heavy chain comprising a V_{H} region amino acid sequence of Seq ID No:33 (comprising the CDRs of 1D05 as described hereinabove) fused to a disabled IgG1 constant region with an amino acid sequence of Seq ID No:205. The light chain comprises a V_{L} amino acid sequence of Seq ID No:43 (comprising the CDRs of 1D05 as described hereinabove) directly fused at the C-terminus to IL-2 D9 (Seq ID No:314), which is directly fused to amino acids 21 to 133 of hIL-2 (Seq ID No:324).

[0778] 1D05 D9-8 ICK comprises a heavy chain comprising a V_{H} region amino acid sequence of Seq ID No:33 (comprising the CDRs of 1D05 as described hereinabove) fused to a disabled IgG1 constant region with an amino acid sequence of Seq ID No:205. The light chain comprises a V_{L} amino acid sequence of Seq ID No:43 (comprising the CDRs of 1D05 as described hereinabove) directly fused at the C-terminus to IL-2 D9-8 (Seq ID No:315), which is directly fused to amino acids 21 to 133 of hIL-2 (Seq ID No:324).

[0779] 1D05 D9-7 ICK comprises a heavy chain comprising a V_{H} region amino acid sequence of Seq ID No:33 (comprising the CDRs of 1D05 as described hereinabove) fused to a disabled IgG1 constant region with an amino acid sequence of Seq ID No:205. The light chain comprises a V_{L} amino acid sequence of Seq ID No:43 (comprising the CDRs of 1D05 as described hereinabove) directly fused at the C-terminus to IL-2 D9-7 (Seq ID No:316), which is directly fused to amino acids 21 to 133 of hIL-2 (Seq ID No:324).

[0780] 1D05 D9-6 ICK comprises a heavy chain comprising a V_{H} region amino acid sequence of Seq ID No:33 (comprising the CDRs of 1D05 as described hereinabove) fused to a disabled IgG1 constant region with an amino acid sequence of Seq ID No:205. The light chain comprises a V_{L} amino acid sequence of Seq ID No:43 (comprising the CDRs of 1D05 as described hereinabove) directly fused at the C-terminus to IL-2 D9-6 (Seq ID No:317), which is directly fused to amino acids 21 to 133 of hIL-2 (Seq ID No:324).

[0781] 1D05 D9-4 ICK comprises a heavy chain comprising a V_{H} region amino acid sequence of Seq ID No:33 (comprising the CDRs of 1D05 as described hereinabove) fused to a disabled IgG1 constant region with an amino acid sequence of Seq ID No:205. The light chain comprises a V_{L} amino acid sequence of Seq ID No:43 (comprising the CDRs of 1D05 as described hereinabove) directly fused at the C-terminus to IL-2 D9-4 (Seq ID No:318), which is directly fused to amino acids 21 to 133 of hIL-2 (Seq ID No:324).

[0782] 1D05 D9-3 ICK comprises a heavy chain comprising a V_{H} region amino acid sequence of Seq ID No:33 (comprising the CDRs of 1D05 as described hereinabove) fused to a disabled IgG1 constant region with an amino acid sequence of Seq ID No:205. The light chain comprises a V_{L} amino acid sequence of Seq ID No:43 (comprising the CDRs of 1D05 as described hereinabove) directly fused at the C-terminus to IL-2 D9-3 (Seq ID No:319), which is directly fused to amino acids 21 to 133 of hIL-2 (Seq ID No:324).

[0783] 1D05 D9-2 ICK comprises a heavy chain comprising a V_{H} region amino acid sequence of Seq ID No:33 (comprising the CDRs of 1D05 as described hereinabove) fused to a disabled IgG1 constant region with an amino acid sequence of Seq ID No:205. The light chain comprises a V_{L} amino acid sequence of Seq ID No:43 (comprising the CDRs of 1D05 as described hereinabove) directly fused at the C-terminus to IL-2 D9-2 (Seq ID No:320), which is directly fused to amino acids 21 to 133 of hIL-2 (Seq ID No:324).

[0784] 1D05 D2-6 ICK comprises a heavy chain comprising a V_{H} region amino acid sequence of Seq ID No:33 (comprising the CDRs of 1D05 as described hereinabove) fused to a disabled IgG1 constant region with an amino acid sequence of Seq ID No:205. The light chain comprises a V_{L} amino acid sequence of Seq ID No:43 (comprising the CDRs of 1D05 as described hereinabove) directly fused at the C-terminus to IL-2 D2-6 (Seq ID No:321), which is directly fused to amino acids 21 to 133 of hIL-2 (Seq ID No:324).

[0785] 1D05 D3-7 ICK comprises a heavy chain comprising a V_{H} region amino acid sequence of Seq ID No:33 (comprising the CDRs of 1D05 as described hereinabove) fused to a disabled IgG1 constant region with an amino acid sequence of Seq ID No:205. The light chain comprises a V_{L} amino acid sequence of Seq ID No:43 (comprising the CDRs of 1D05 as described hereinabove) directly fused at the C-terminus to IL-2 D3-7 (Seq ID No:322), which is directly fused to amino acids 21 to 133 of hIL-2 (Seq ID No:324).

[0786] 1D05 D4-8 ICK comprises a heavy chain comprising a V_{H} region amino acid sequence of Seq ID No:33 (comprising the CDRs of 1D05 as described hereinabove) fused to a disabled IgG1 constant region with an amino acid sequence of Seq ID No:205. The light chain comprises a V_{L} amino acid sequence of Seq ID No:43 (comprising the CDRs of 1D05 as described hereinabove) directly fused at the C-terminus to IL-2 D4-8 (Seq ID No:323), which is directly fused to amino acids 21 to 133 of hIL-2 (Seq ID No:324).

[0787] In any of the ICK constructs above, the IL-2 binding portion may be a variant IL-2, in particular an IL-2 having an R38A mutation (as described in amino acids 21-133 of the variant IL-2 described as SEQ ID NO:517) or an R38Q mutation (as described in amino acids 21-133 of the variant IL-2 described as SEQ ID NO:518).

[0788] In any of the ICK constructs above, the V_{H} region of the 1D05 antibody may be exchanged for the V_{H} region of mutated 1D05—Heavy Chain mutant 1 (Seq ID No:47), mutated 1D05—Heavy Chain mutant 2 (Seq ID No:48), mutated 1D05—Heavy Chain mutant 3 (Seq ID No:49) or mutated 1D05—Heavy Chain mutant 4 (Seq ID No:342). A preferred mutated heavy chain V_{H} region of 1D05 is mutated 1D05—Heavy Chain mutant 4 (Seq ID No:342).

[0789] Thus, certain ICK constructs comprise:

[0790] Mutated 1D05—Heavy Chain mutant 4 D5-9 ICK, which comprises a heavy chain comprising a V_{H} region amino acid sequence of Seq ID No:342 (comprising the CDRs of mutated 1D05—Heavy Chain mutant 4 as described herein) fused to a disabled IgG1 constant region with an amino acid sequence of Seq ID No:205. The light chain comprises a V_{L} amino acid sequence of Seq ID No:43 (comprising the CDRs of 1D05 as described hereinabove) directly fused at the C-terminus to IL-2 D5-9 (Seq ID No:303), which is directly fused to amino acids 21 to 133 of hIL-2 (Seq ID No:324).

[0791] Mutated 1D05—Heavy Chain mutant 4 D1-9 ICK, which comprises a heavy chain comprising a V_{H} region amino acid sequence of Seq ID No:342 (comprising the CDRs of mutated 1D05—Heavy Chain mutant 4 as described herein) fused to a disabled IgG1 constant region with an amino acid sequence of Seq ID No:205. The light chain comprises a V_{L} amino acid sequence of Seq ID No:43 (comprising the CDRs of 1D05 as described hereinabove) directly fused at the C-terminus to IL-2 D1-9 (Seq ID No:304), which is directly fused to amino acids 21 to 133 of hIL-2 (Seq ID No:324).

[0792] Mutated 1D05—Heavy Chain mutant 4 D1-8 ICK, which comprises a heavy chain comprising a V_{H} region amino acid sequence of Seq ID No:342 (comprising the CDRs of mutated 1D05—Heavy Chain mutant 4 as described herein) fused to a disabled IgG1 constant region with an amino acid sequence of Seq ID No:205. The light chain comprises a V_{L} amino acid sequence of Seq ID No:43 (comprising the CDRs of 1D05 as described hereinabove) directly fused at the C-terminus to IL-2 D1-8 (Seq ID No:313), which is directly fused to amino acids 21 to 133 of hIL-2 (Seq ID No:324).

[0793] Mutated 1D05—Heavy Chain mutant 4 D9-7 ICK, which comprises a heavy chain comprising a V_{H} region amino acid sequence of Seq ID No:342 (comprising the CDRs of mutated 1D05—Heavy Chain mutant 4 as described herein) fused to a disabled IgG1 constant region with an amino acid sequence of Seq ID No:205. The light chain comprises a V_{L} amino acid sequence of Seq ID No:43 (comprising the CDRs of 1D05 as described hereinabove) directly fused at the C-terminus to IL-2 D9-7 (Seq ID No:316), which is directly fused to amino acids 21 to 133 of hIL-2 (Seq ID No:324).

[0794] Mutated 1D05—Heavy Chain mutant 4 D9-2 ICK, which comprises a heavy chain comprising a V_{H} region amino acid sequence of Seq ID No:342 (comprising the CDRs of mutated 1D05—Heavy Chain mutant 4 as described herein) fused to a disabled IgG1 constant region with an amino acid sequence of Seq ID No:205. The light chain comprises a V_{L} amino acid sequence of Seq ID No:43 (comprising the CDRs of 1D05 as described hereinabove) directly fused at the C-terminus to IL-2 D9-2 (Seq ID No:320), which is directly fused to amino acids 21 to 133 of hIL-2 (Seq ID No:324).

[0795] In any of the ICK constructs above, the V_{L} region of the 1D05 antibody may be exchanged for the V_{L} region of mutated 1D05—Light Chain mutant 1 (Seq ID No:50), mutated 1D05—Light Chain mutant 2 (Seq ID No:51) or mutated 1D05—Light Chain mutant 3 (Seq ID No:298).

[0796] In any of the ICK constructs above, both the V_{H} and V_{L} region of the 1D05 antibody may be exchanged for both the V_{H} and V_{L} regions of any of the other antibodies described herein, i.e. 84G09, 411B08, 411C04, 411D07, 385F01, 413D08, 386H03, 389A03, 413G05, 413F09 and 414B06.

[0797] In any of the ICK constructs above, the heavy chain constant region of Seq ID No:205 may be exchanged for any of the heavy chain constant regions of Seq ID Nos:193, 195, 197, 199, 203, 205, 340, 524, 526, 528, 530, 532 or 534.

[0798] Immunocytokines may be described in the following sentences or aspects. Unless otherwise apparent, the features of any of the concepts described hereinabove apply mutatis mutandis to any of the aspects hereinbelow.

Aspect 1. An immunocytokine comprising an immunoglobulin heavy chain and an immunoglobulin light chain, wherein the heavy chain comprises in N- to C-terminal direction:
[0799] a) A V_{H} domain comprising CDRH1, CDRH2 and CDRH3; and
[0800] b) A heavy chain constant region;
[0801] and wherein the light chain comprises in N- to C-terminal direction:
[0802] c) A V_{L} domain comprising CDRL1, CDRL2 and CDRL3;
[0803] d) A light chain constant region, (C_{L});
[0804] e) Optionally, a linker, (L); and
[0805] f) An IL-2 cytokine;
[0806] wherein the V_{H} domain and V_{L} domain are comprised by an antigen-binding site that specifically binds to hPD-L1 as defined by Seq ID No:1, and competes for binding to said hPD-L1 with the antibody 1D05; and
[0807] wherein the immunocytokine comprises a V_{H} domain which comprises a CDRH3 comprising the motif X₁GSGX₂YGX₃X₄FD, wherein X₁, X₂ and X₃ are independently any amino acid, and X₄ is either present or absent, and if present, may be any amino acid.

[0808] In the aspects described herein, CDR sequences may be determined according to any method known to those skilled in the art, such as using the Kabat method, the IMGT method or the Chothia method, each of which are described in more detail herein. In one embodiment, the CDR regions are human CDR regions.

[0809] In addition to the CDR regions, the V_{H} and/or V_{L} domains may further comprise framework regions, such as FW1, FW2 and FW3. The V_{H} and/or V_{L} domains may be of any origin described herein, and may be for example, fully human, humanised, murine or camelid. In one embodiment, the V_{H} and/or V_{L} domains are human V_{H} and/or V_{L} domains. CDRs may be of a non-human origin (e.g. mouse origin) and be grafted onto human framework regions. In another embodiment, the CDRs are synthetic.

[0810] In another embodiment, V_{H} regions may be selected from the group consisting of an antibody variable domain (e.g. a V_{L} or a V_{H}, an antibody single variable domain (domain antibody or dAb), a camelid V_{HH} antibody single variable domain, a shark immunoglobulin single variable domain (NARV), a Nanobody™ or a camelised V_{H} single variable domain); a T-cell receptor binding domain; an immunoglobulin superfamily domain; an agnathan variable lymphocyte receptor; a fibronectin domain (e.g. an Adnectin™); an antibody constant domain (e.g. a CH₃ domain, e.g. a CH₂ and/or CH₃ of an Fcab™) wherein the constant domain is not a functional CH₁ domain; an scFv; an (scFv)2; an sc-diabody; an scFab; a centyrin and an epitope binding domain derived from a scaffold selected from CTLA-4 (Evibody™); a lipocalin domain; Protein A such as Z-domain of Protein A (e.g. an Affibody™ or SpA); an A-domain (e.g. an Avimer™ or Maxibody™); a heat shock protein (such as and epitope binding domain derived from GroEI and GroES); a transferrin domain (e.g. a trans-body); ankyrin repeat protein (e.g. a DARPin™); peptide aptamer; C-type lectin domain (e.g. Tetranectin™); human γ-crystallin or human ubiquitin (an affilin); a PDZ domain; scorpion toxin; and a kunitz type domain of a human protease inhibitor.

[0811] The constant region comprises at least two heavy chain constant region domains selected from CH₁, CH₂, CH₃ and CH₄. In one embodiment, the constant region comprises (or consists of) a CH₁ domain and a CH₂ domain. In one embodiment, the constant region comprises (or consists of) a CH₁ domain, a hinge region and a CH₂ domain. In one embodiment, the constant region comprises (or consists of) a CHI domain and a CH₃ domain, and optionally a hinge region. In one embodiment, the constant region comprises (or consists of) a CH₁ domain and a CH₄ domain, and optionally a hinge region. In one embodiment, the constant region comprises (or consists of) a CH₁ domain, a CH₂ domain and a CH₃ domain, and optionally a hinge region. In one embodiment, the constant region comprises (or consists of) a CH₁ domain, a CH₂ domain and a CH₄ domain, and optionally a hinge region. In one embodiment, the constant region comprises (or consists of) a CH₁ domain, a CH₃ domain and a CH₄ domain, and optionally a hinge region. In one embodiment, the constant region comprises (or consists of) a full constant region.

[0812] The constant region may be of any isotype described herein, e.g. IgA, IgD, IgE, IgG, and IgM. In one embodiment, the constant region is of any origin described herein, and may be for example, human, murine or camelid. In one embodiment, the constant region is a (full) human constant region. In one embodiment, the constant region is a human IgG constant region. In one embodiment, the constant region is a (full) human IgG1 constant region. In one embodiment, the constant region is an effector null (full) human IgG1 constant region. In one embodiment, the constant region has CDC and/or ADCC and/or ADCP activity. In one embodiment, the constant region is engineered to enhance the CDC and/or ADCC and/or ADCP activity. The constant region may be any of the constant regions described in concepts 30 to 32 hereinabove.

[0813] The light chain constant region may be a kappa or lambda light chain constant region. The light chain constant region may be as described in concept 28 hereinabove.

[0814] An IL-2 cytokine is a cytokine molecule which confers IL-2 activity on one or both of the intermediate affinity IL-2 Receptor (4) and the high affinity IL-2 receptor (αβγ). An IL-2 cytokine includes variant IL-2 cytokines. An IL-2 cytokine may be of human origin or of non-human origin, for example of a non-human mammal, including, but not limited to, primates (e.g. monkeys such a rhesus macaque or cynomolgus), rodents (such as mice, rats and guinea pigs) farm animals, (such as cattle, sheep, pigs, goats, horses, chickens, turkeys, ducks and geese), and domestic mammals (such as dogs and cats). In one embodiment, an IL-2 cytokine is a human IL-2 cytokine.

[0815] As used herein, a “variant IL-2 cytokine” is a cytokine having up to 10 amino acids deleted from the N terminal sequence, in combination with up to 5 amino acid substitutions, deletions or additions elsewhere in the IL-2 cytokine. In one embodiment, the variant IL-2 cytokine comprises (or consists of) up to 10 (e.g. 1, 2, 3, 4, 5, 6, 7, 8, 9 or 10) amino acid deletions from the N-terminal sequence (e.g. within the first 20, or first 15, or first 10 amino acids of the wild-type IL-2 sequence in question), in combination with up to 5 (e.g. 1, 2, 3, 4 or 5) amino acid substitutions elsewhere in the IL-2 cytokine. In one embodiment, the variant IL-2 cytokine comprises (or consists of) up to 10 (e.g. 1, 2, 3, 4, 5, 6, 7, 8, 9 or 10) amino acid deletions from the N-terminal sequence (e.g. within the first 15 amino acids of the wild-type IL-2 sequence in question), in combination with up to 5 (e.g. 1, 2, 3, 4 or 5) amino acid substitutions elsewhere in the IL-2 cytokine. In one embodiment, the variant IL-2 cytokine comprises (or consists of) up to 10 (e.g. 1, 2, 3, 4, 5, 6, 7, 8, 9 or 10) amino acid deletions from the N-terminal sequence (e.g. within the first 10 amino acids of the wild-type IL-2 sequence in question), in combination with up to 5 (e.g. 1, 2, 3, 4 or 5) amino acid substitutions elsewhere in the IL-2 cytokine. In one embodiment, the variant IL-2 cytokine comprises (or consists of) up to 10 (e.g. 1, 2, 3, 4, 5, 6, 7, 8, 9 or 10) amino acid deletions from the N-terminal sequence (e.g. within the first 20, or first 15, or first 10 amino acids of the wild-type IL-2 sequence in question), in combination with up to 4 (e.g. 1, 2, 3 or 4) amino acid substitutions elsewhere in the IL-2 cytokine. In one embodiment, the variant IL-2 cytokine comprises (or consists of) up to 10 (e.g. 1, 2, 3, 4, 5, 6, 7, 8, 9 or 10) amino acid deletions from the N-terminal sequence (e.g. within the first 20, or first 15, or first 10 amino acids of the wild-type IL-2 sequence in question), in combination with up to 3 (e.g. 1, 2 or 3) amino acid substitutions elsewhere in the IL-2 cytokine. In one embodiment, the variant IL-2 cytokine comprises (or consists of) up to 10 (e.g. 1, 2, 3, 4, 5, 6, 7, 8, 9 or 10) amino acid deletions from the N-terminal sequence (e.g. within the first 20, or first 15, or first 10 amino acids of the wild-type IL-2 sequence in question), in combination with up to 2 (e.g. 1 or 2) amino acid substitutions elsewhere in the IL-2 cytokine. In one embodiment, the variant IL-2 cytokine comprises (or consists of) up to 10 (e.g. 1, 2, 3, 4, 5, 6, 7, 8, 9 or 10) amino acid deletions from the N-terminal sequence (e.g. within the first 20, or first 15, or first 10 amino acids of the wild-type IL-2 sequence in question), in combination with 1 amino acid substitution elsewhere in the IL-2 cytokine.

[0816] In one embodiment, the variant IL-2 cytokine comprises (or consists of) up to 9 (e.g. 1, 2, 3, 4, 5, 6, 7, 8 or 9) amino acid deletions from the N-terminal sequence (e.g. within the first 20, or first 15, or first 10 amino acids of the wild-type IL-2 sequence in question), in combination with up to 4 (e.g. 1, 2, 3 or 4) amino acid substitutions elsewhere in the IL-2 cytokine. In one embodiment, the variant IL-2 cytokine comprises (or consists of) up to 9 (e.g. 1, 2, 3, 4, 5, 6, 7, 8 or 9) amino acid deletions from the N-terminal sequence (e.g. within the first 20, or first 15, or first 10 amino acids of the wild-type IL-2 sequence in question), in combination with up to 3 (e.g. 1, 2 or 3) amino acid substitutions elsewhere in the IL-2 cytokine. In one embodiment, the variant IL-2 cytokine comprises (or consists of) up to 9 (e.g. 1, 2, 3, 4, 5, 6, 7, 8 or 9) amino acid deletions from the N-terminal sequence (e.g. within the first 20, or first 15, or first 10 amino acids of the wild-type IL-2 sequence in question), in combination with up to 2 (e.g. 1 or 2) amino acid substitutions elsewhere in the IL-2 cytokine. In one embodiment, the variant IL-2 cytokine comprises (or consists of) up to 9 (e.g. 1, 2, 3, 4, 5, 6, 7, 8 or 9) amino acid deletions from the N-terminal sequence (e.g. within the first 20, or first 15, or first 10 amino acids of the wild-type IL-2 sequence in question), in combination with one amino acid substitution elsewhere in the IL-2 cytokine.

[0817] In one embodiment, the variant IL-2 cytokine comprises (or consists of) up to 8 (e.g. 1, 2, 3, 4, 5, 6, 7 or 8) amino acid deletions from the N-terminal sequence (e.g. within the first 20, or first 15, or first 10 amino acids of the wild-type IL-2 sequence in question), in combination with up to 4 (e.g. 1, 2, 3 or 4) amino acid substitutions elsewhere in the IL-2 cytokine. In one embodiment, the variant IL-2 cytokine comprises (or consists of) up to 8 (e.g. 1, 2, 3, 4, 5, 6, 7 or 8) amino acid deletions from the N-terminal sequence (e.g. within the first 20, or first 15, or first 10 amino acids of the wild-type IL-2 sequence in question), in combination with up to 3 (e.g. 1, 2 or 3) amino acid substitutions elsewhere in the IL-2 cytokine. In one embodiment, the variant IL-2 cytokine comprises (or consists of) up to 8 (e.g. 1, 2, 3, 4, 5, 6, 7 or 8) amino acid deletions from the N-terminal sequence (e.g. within the first 20, or first 15, or first 10 amino acids of the wild-type IL-2 sequence in question), in combination with up to 2 (e.g. 1 or 2) amino acid substitutions elsewhere in the IL-2 cytokine. In one embodiment, the variant IL-2 cytokine comprises (or consists of) up to 8 (e.g. 1, 2, 3, 4, 5, 6, 7 or 8) amino acid deletions from the N-terminal sequence (e.g. within the first 20, or first 15, or first 10 amino acids of the wild-type IL-2 sequence in question), in combination with one amino acid substitution elsewhere in the IL-2 cytokine.

[0818] In one embodiment, the variant IL-2 cytokine comprises (or consists of) up to 7 (e.g. 1, 2, 3, 4, 5, 6 or 7) amino acid deletions from the N-terminal sequence (e.g. within the first 20, or first 15, or first 10 amino acids of the wild-type IL-2 sequence in question), in combination with up to 4 (e.g. 1, 2, 3 or 4) amino acid substitutions elsewhere in the IL-2 cytokine. In one embodiment, the variant IL-2 cytokine comprises (or consists of) up to 7 (e.g. 1, 2, 3, 4, 5, 6 or 7) amino acid deletions from the N-terminal sequence (e.g. within the first 20, or first 15, or first 10 amino acids of the wild-type IL-2 sequence in question), in combination with up to 3 (e.g. 1, 2 or 3) amino acid substitutions elsewhere in the IL-2 cytokine. In one embodiment, the variant IL-2 cytokine comprises (or consists of) up to 7 (e.g. 1, 2, 3, 4, 5, 6 or 7) amino acid deletions from the N-terminal sequence (e.g. within the first 20, or first 15, or first 10 amino acids of the wild-type IL-2 sequence in question), in combination with up to 2 (e.g. 1 or 2) amino acid substitutions elsewhere in the IL-2 cytokine. In one embodiment, the variant IL-2 cytokine comprises (or consists of) up to 7 (e.g. 1, 2, 3, 4, 5, 6 or 7) amino acid deletions from the N-terminal sequence (e.g. within the first 20, or first 15, or first 10 amino acids of the wild-type IL-2 sequence in question), in combination with one amino acid substitution elsewhere in the IL-2 cytokine.

[0819] In one embodiment, the variant IL-2 cytokine comprises (or consists of) up to 6 (e.g. 1, 2, 3, 4, 5 or 6) amino acid deletions from the N-terminal sequence (e.g. within the first 20, or first 15, or first 10 amino acids of the wild-type IL-2 sequence in question), in combination with up to 4 (e.g. 1, 2, 3 or 4) amino acid substitutions elsewhere in the IL-2 cytokine. In one embodiment, the variant IL-2 cytokine comprises (or consists of) up to 6 (e.g. 1, 2, 3, 4, 5 or 6) amino acid deletions from the N-terminal sequence (e.g. within the first 20, or first 15, or first 10 amino acids of the wild-type IL-2 sequence in question), in combination with up to 3 (e.g. 1, 2 or 3) amino acid substitutions elsewhere in the IL-2 cytokine. In one embodiment, the variant IL-2 cytokine comprises (or consists of) up to 6 (e.g. 1, 2, 3, 4, 5 or 6) amino acid deletions from the N-terminal sequence (e.g. within the first 20, or first 15, or first 10 amino acids of the wild-type IL-2 sequence in question), in combination with up to 2 (e.g. 1 or 2) amino acid substitutions elsewhere in the IL-2 cytokine.

[0820] In one embodiment, the variant IL-2 cytokine comprises (or consists of) up to 5 (e.g. 1, 2, 3, 4 or 5) amino acid deletions from the N-terminal sequence (e.g. within the first 20, or first 15, or first 10 amino acids of the wild-type IL-2 sequence in question), in combination with up to 4 (e.g. 1, 2, 3 or 4) amino acid substitutions elsewhere in the IL-2 cytokine. In one embodiment, the variant IL-2 cytokine comprises (or consists of) up to 5 (e.g. 1, 2, 3, 4 or 5) amino acid deletions from the N-terminal sequence (e.g. within the first 20, or first 15, or first 10 amino acids of the wild-type IL-2 sequence in question), in combination with up to 4 (e.g. 1, 2, 3 or 4) amino acid substitutions elsewhere in the IL-2 cytokine. In one embodiment, the variant IL-2 cytokine comprises (or consists of) up to 5 (e.g. 1, 2, 3, 4 or 5) amino acid deletions from the N-terminal sequence (e.g. within the first 20, or first 15, or first 10 amino acids of the wild-type IL-2 sequence in question), in combination with up to 4 (e.g. 1, 2, 3 or 4) amino acid substitutions elsewhere in the IL-2 cytokine. In one embodiment, the variant IL-2 cytokine comprises (or consists of) up to 6 (e.g. 1, 2, 3, 4, 5 or 6) amino acid deletions from the N-terminal sequence (e.g. within the first 20, or first 15, or first 10 amino acids of the wild-type IL-2 sequence in question), in combination with one amino acid substitution elsewhere in the IL-2 cytokine.

[0821] In one embodiment, the variant IL-2 cytokine comprises (or consists of) up to 4 (e.g. 1, 2, 3 or 4) amino acid deletions from the N-terminal sequence (e.g. within the first 20, or first 15, or first 10 amino acids of the wild-type IL-2 sequence in question), in combination with up to 4 (e.g. 1, 2, 3 or 4) amino acid substitutions elsewhere in the IL-2 cytokine. In one embodiment, the variant IL-2 cytokine comprises (or consists of) up to 4 (e.g. 1, 2, 3 or 4) amino acid deletions from the N-terminal sequence (e.g. within the first 20, or first 15, or first 10 amino acids of the wild-type IL-2 sequence in question), in combination with up to 3 (e.g. 1, 2 or 3) amino acid substitutions elsewhere in the IL-2 cytokine. In one embodiment, the variant IL-2 cytokine comprises (or consists of) up to 4 (e.g. 1, 2, 3 or 4) amino acid deletions from the N-terminal sequence (e.g. within the first 20, or first 15, or first 10 amino acids of the wild-type IL-2 sequence in question), in combination with up to 2 (e.g. 1 or 2) amino acid substitutions elsewhere in the IL-2 cytokine. In one embodiment, the variant IL-2 cytokine comprises (or consists of) up to 4 (e.g. 1, 2, 3 or 4) amino acid deletions from the N-terminal sequence (e.g. within the first 20, or first 15, or first 10 amino acids of the wild-type IL-2 sequence in question), in combination with one amino acid substitution elsewhere in the IL-2 cytokine.

[0822] In one embodiment, the variant IL-2 cytokine comprises (or consists of) up to 3 (e.g. 1, 2 or 3) amino acid deletions from the N-terminal sequence (e.g. within the first 20, or first 15, or first 10 amino acids of the wild-type IL-2 sequence in question), in combination with up to 4 (e.g. 1, 2, 3 or 4) amino acid substitutions elsewhere in the IL-2 cytokine. In one embodiment, the variant IL-2 cytokine comprises (or consists of) up to 3 (e.g. 1, 2 or 3) amino acid deletions from the N-terminal sequence (e.g. within the first 20, or first 15, or first 10 amino acids of the wild-type IL-2 sequence in question), in combination with up to 3 (e.g. 1, 2 or 3) amino acid substitutions elsewhere in the IL-2 cytokine. In one embodiment, the variant IL-2 cytokine comprises (or consists of) up to 3 (e.g. 1, 2 or 3) amino acid deletions from the N-terminal sequence (e.g. within the first 20, or first 15, or first 10 amino acids of the wild-type IL-2 sequence in question), in combination with up to 2 (e.g. 1 or 2) amino acid substitutions elsewhere in the IL-2 cytokine. In one embodiment, the variant IL-2 cytokine comprises (or consists of) up to 3 (e.g. 1, 2 or 3) amino acid deletions from the N-terminal sequence (e.g. within the first 20, or first 15, or first 10 amino acids of the wild-type IL-2 sequence in question), in combination with one amino acid substitution elsewhere in the IL-2 cytokine.

[0823] In one embodiment, the variant IL-2 cytokine comprises (or consists of) 1 or 2 amino acid deletions from the N-terminal sequence (e.g. within the first 20, or first 15, or first 10 amino acids of the wild-type IL-2 sequence in question), in combination with up to 4 (e.g. 1, 2, 3 or 4) amino acid substitutions elsewhere in the IL-2 cytokine. In one embodiment, the variant IL-2 cytokine comprises (or consists of) 1 or 2 amino acid deletions from the N-terminal sequence (e.g. within the first 20, or first 15, or first 10 amino acids of the wild-type IL-2 sequence in question), in combination with up to 3 (e.g. 1, 2 or 3) amino acid substitutions elsewhere in the IL-2 cytokine. In one embodiment, the variant IL-2 cytokine comprises (or consists of) 1 or 2 amino acid deletions from the N-terminal sequence (e.g. within the first 20, or first 15, or first 10 amino acids of the wild-type IL-2 sequence in question), in combination with up to 2 (e.g. 1 or 2) amino acid substitutions elsewhere in the IL-2 cytokine. In one embodiment, the variant IL-2 cytokine comprises (or consists of) 1 or 2 amino acid deletions from the N-terminal sequence (e.g. within the first 20, or first 15, or first 10 amino acids of the wild-type IL-2 sequence in question), in combination with one amino acid substitution elsewhere in the IL-2 cytokine.

[0824] Substitutions elsewhere in the IL-2 cytokine are defined further in aspect 44 hereinbelow.

[0825] Particular IL-2 cytokines and variant IL-2 cytokines are further defined in aspects 40 to 45 hereinbelow.

[0826] The amino acid sequence of the α-chain of human IL-2 is provided in Seq ID No:327. The amino acid sequence of the β-chain of human IL-2 is provided in Seq ID No:328. The amino acid sequence of the γ-chain of human IL-2 is provided in Seq ID No:239.

[0827] In any of the aspects or concepts herein, an immunocytokine or anti-PDL1 antibody or fragment may have a half-life of at least 4 hours, 5 hours, 6 hours, 7 hours or 8 hours. In another embodiment, the half-life of any of the immunocytokines or anti-PD-L1 antibodies or fragments provided herein is at least 9 hours, or at least 10 hours, or at least 11 hours, or at least 12 hours. In another embodiment, the half-life of any of the immunocytokines or anti-PD-L1 antibodies or fragments provided herein is at least 13 hours, or at least 14 hours, or at least 15 hours, or at least 16 hours. In another embodiment, the half-life of any of the immunocytokines or anti-PD-L1 antibodies or fragments provided herein is at least 17 hours, or at least 18 hours, or at least 19 hours, or at least 20 hours. In another embodiment, the half-life of any of the immunocytokines or anti-PD-L1 antibodies or fragments provided herein is at least 21 hours, or at least 22 hours, or at least 23 hours, or at least 24 hours. In another embodiment, the half-life of any of the immunocytokines or anti-PD-L1 antibodies or fragments provided herein is at least 25 hours, or at least 26 hours, or at least 27 hours, or at least 30 hours. In another embodiment, the half-life of any of the immunocytokines or anti-PD-L1 antibodies or fragments provided herein is at least 32 hours, or at least 34 hours, or at least 36 hours, or at least 40 hours. In one embodiment, the half-life is determined in a mouse model (for example a human PD-L1 knock-in mouse, e.g. as described in Example 22 hereinbelow, or in an immunocompromised mouse xenografted with human T-cells). In another embodiment, the half life is determined in a single dose study in cynomolgus monkeys (e.g. as described in Example 18 or Example 23 hereinbelow). In another embodiment, the half life is determined in an extended single dose study in cynomolgus monkeys (e.g. as described in Example 19 or Example 26 hereinbelow).

Aspect 1a. An immunocytokine comprising an immunoglobulin heavy chain and an immunoglobulin light chain, wherein the heavy chain comprises in N- to C-terminal direction:
[0828] a) A V_{H} domain comprising CDRH1, CDRH2 and CDRH3; and
[0829] b) A heavy chain constant region;

[0830] and wherein the light chain comprises in N- to C-terminal direction:
[0831] c) A V_{L} domain comprising CDRL1, CDRL2 and CDRL3;
[0832] d) A light chain constant region, (C_{L});
[0833] e) Optionally, a linker, (L); and
[0834] f) An IL-2 cytokine;
[0835] wherein the V_{H} domain and V_{L} domain are comprised by an antigen-binding site that specifically binds to an antigen selected from: an immune checkpoint inhibitor (such as PD-1, CTLA-4, TIGIT, TIM-3, LAG-3 and VISTA, e.g. TIGIT, TIM-3 and LAG-3), an immune modulator (such as BTLA, hHVEM,

[0836] CSF1R, CCR4, CD39, CD40, CD73, CD96, CXCR2, CXCR4, CD200, GARP, SIRPα, CXCL9, CXCL10, CXCL11 and CD155, e.g. GARP, SIRPα, CXCR4, BTLA, hVEM and CSF1R), and an immune activator (such as CD137, GITR, OX40, CD40, CXCR3 (e.g. agonistic activity against CXCR3), CD27, CD3 and ICOS (e.g. agonistic activity against ICOS), for example, ICOS, CD137, GITR and OX40).

[0837] In another embodiment, the antigen-binding site that specifically binds to an antigen selected from: an immune checkpoint inhibitor (such as PD-1, CTLA-4, TIGIT, TIM-3, LAG-3 and VISTA, e.g. TIGIT, TIM-3 and LAG-3), an immune modulator (such as BTLA, hHVEM, CSF1R, CCR4, CD39, CD40, CD73, CD96, CXCR2, CXCR4, CD200, GARP, SIRPα, CXCL9, CXCL10 and CD155, e.g. GARP, SIRPα, CXCR4, BTLA, hVEM and CSF1R), and an immune activator (such as CD137, GITR, OX40, CD40, CXCR3 (e.g. agonistic activity against CXCR3), CD3 and ICOS (e.g. agonistic activity against ICOS), for example, ICOS, CD137, GITR and OX40).

[0838] Any of the embodiments of aspect 1 apply mutatis mutandis to aspect 1a. Any of the features or embodiments of aspects 2 to 54 apply mutatis mutandis to aspect 1a. Any of the features of the antibodies or other embodiments or features of concepts 1 to 70 apply mutatis mutandis to aspect 1a.

[0839] In one embodiment, the antigen-binding site specifically binds PD-L1, e.g. hPD-L1. In one embodiment, the PD-L1 antigen-binding site comprises the CDRH1, CDRH2, CDRH3, CDRL1, CDRL2 and CDRL3, or the V_{H}, or the V_{L} or the V_{H} and V_{L} region from any one of the anti-PD-L1 antibodies selected from atezolizumab/MPDL3280A (Roche), avelumab/MSB0010718C (Merck), BMS-936559/MDX-1105 (BMS), durvalumab/Medi4736 (Medimmune), KN-035, CA-170, FAZ-053 M7824, ABBV-368, LY-3300054, GNS-1480, YW243.55.S70, REGN3504 and any of the PD-L1 antibodies disclosed in WO2017/034916, WO2017/020291, WO2017/020858, WO2017/020801, WO2016/111645, WO2016/050721, WO2016/197367, WO2016/061142, WO2016/149201, WO2016/000619, WO2016/160792, WO2016/022630, WO2016/007235, WO2015/179654, WO2015/173267, WO2015/181342, WO2015/109124, WO2015/195163, WO2015/112805, WO2015/061668, WO2014/159562, WO2014/165082, WO2014/100079, WO2014/055897, WO2013/181634, WO2013/173223, WO2013/079174, WO2012/145493, WO2011/066389, WO2010/077634, WO2010/036959, WO2010/089411 or WO2007/005874, which antibodies and sequences are incorporated herein by reference.

[0840] In one embodiment, the antigen-binding site specifically binds ICOS, e.g. hICOS. In one embodiment, the antigen-binding site specifically binds ICOS, e.g. hICOS and is an agonist to ICOS, e.g. hICOS. In one embodiment, the antigen-binding site specifically binds ICOS, e.g. hICOS and is an antagonist to ICOS, e.g. hICOS. In one embodiment, the ICOS antigen-binding site comprises the CDRH1, CDRH2, CDRH3, CDRL1, CDRL2 and CDRL3, or the V_{H}, or the V_{L} or the V_{H} and V_{L} region from any one of the anti-ICOS antibodies described in arrangement 5 and arrangement 5a hereinbelow, and any of the anti-ICOS antibodies described in sentences 1 to 102 and sentences 1a to 21a.

[0841] In any of the following embodiments, a particular antigen-binding site specifically binds to a human target. In one embodiment, the antigen-binding site specifically binds an immune checkpoint inhibitor. In one embodiment, the antigen-binding site specifically binds an immune checkpoint inhibitor selected from PD-1, CTLA-4, TIGIT, TIM-3, LAG-3 and VISTA. In one embodiment, the antigen-binding site specifically binds an immune checkpoint inhibitor selected from TIGIT, CTLA-4, TIM-3 and LAG-3.

[0842] In one embodiment, the antigen-binding site specifically binds PD-1, e.g. human PD-1. In one embodiment, the PD-1 antigen-binding site comprises the CDRH1, CDRH2, CDRH3, CDRL1, CDRL2 and CDRL3, or the V_{H}, or the V_{L} or the V_{H} and V_{L} region from pembrolizumab (Keytruda®/MK-3475), nivolumab (Opdivo®/BMS-936558/MDX-1106), MEDI-0680/AMP514, PDR001, Lambrolizumab, BMS-936558, REGN2810, BGB-A317, BGB-108, PDR-001, SHR-1210, JS-001, JNJ-63723283, AGEN-2034, PF-06801591, genolimzumab, MGA-012, IBI-308, BCD-100, TSR-042 ANA011, AUNP-12, KD033, MCLA-134, mDX400, muDX400, STI-A1110, AB011, 244C8, 388D4, XCE853, or pidilizumab/CT-011, or from any one of the anti-PD-1 antibodies described in WO2015/112800 & US2015/0203579 (including the antibodies in Tables 1 to 3), U.S. Pat. Nos. 9,394,365, 5,897,862 and 7,488,802, WO2017/087599 (including antibody SSI-361 and SHB-617), WO2017/079112, WO2017/071625 (including deposit C2015132, hybridoma LT004, and antibodies 6F5/6 F5 (Re), 6F5H1 L1 and 6F5 H2L2), WO2017/058859 (including PD1AB-1 to PD1AB-6), WO2017/058115 (including 67D9, c67D9, and hu67D9), WO2017/055547 (including 12819.15384, 12748.15381, 12748.16124, 12865.15377, 12892.15378, 12796.15376, 12777.15382, 12760.15375 and 13112.15380), WO2017/040790 (including AGEN2033w, AGEN2034w, AGEN2046w, AGEN2047w, AGEN2001w and AGEN2002w), WO2017/025051 & WO2017/024515 (including 1.7.3 hAb, 1.49.9 hAb, 1.103.11 hAb, 1.103.11-v2 hAb, 1.139.15 hAb and 1.153.7 hAb), WO2017/025016 & WO2017/024465 (including antibody A to antibody I), WO2017/020858 & WO2017/020291 (including 1.4.1, 1.14.4, 1.20.15 and 1.46.11), WO2017/019896 & WO2015/112900 & US2015/0210769 (including BAP049-hum01 to BAP049-hum16 and BAP049-Clone-A to BAP049-Clone-E), WO2017/019846 (including PD-1 mAb 1 to PD-1 mAb 15), WO2017/016497 (including MHC723, MHC724, MHC725, MHC728, MHC729, m136-M13, m136-M19, m245-M3, m245-M5 and m136-M14), WO2016/201051 (including antibody EH12.2H7, antibody hPD-1 mAb2, antibody hPD-1 mAb7, antibody hPD-1 mAb9, antibody hPD-1 mAb15, or an anti-PD-1 antibody selected from Table 1), WO2016/197497 (including DFPD1-1 to DFPD1-13), WO2016/197367 (including 2.74.15 and 2.74.15.hAb4 to 2.74.15.hAb8), WO2016/196173 (including the antibodies in Table 5, and FIGS. 1-5), WO2016/127179 (including R3A1, R3A2, R4B3, and R3D6), WO2016/077397 (including the antibodies described in Table 1 of Example 9), WO2016/106159 (including the murine antibodies in Table 3 of Example 2 and the humanised antibodies in Tables 7, 8 and 9 of Example 3), WO2016/092419 (including C1, C2, C3, EH12.1, mAb7-G4, mAb15-G4, mAb-AAA, mAb15-AAA), WO2016/068801 (including clone A3 and its variants and the other antibodies described in FIGS. 1 to 4), WO2016/014688 (including 10D1, 4C10, 7D3, 13F1, 15H5, 14A6, 22A5, 6E1, 5A8, 7A4, and 7A4D and the humanised antibodies of Examples 9/10), WO2016/015685 (including 10F8, BA-08-1, BA-08-2 and 15H6), WO2015/091911 & WO2015/091910 (including the anti-canine PD-1 antibodies in Examples 2, 3 and 4), WO2015/091914 (including the anti-canine PD-1 antibodies in Table 3), WO2015/085847 (including mAb005, H005-1 to H005-4), WO2015/058573 (including cAB7), WO2015/036394 (including LOPD180), WO2015/035606 (including the antibodies in Table 1 of Example 2, in Tables 14, 15 and 16 of Example 7 and in tables 20, 21 and 22 of Example 11), WO2014/194302 (including GA2, RG1B3, RG1H10, RG2A7, RG2H10, SH-A4, RG4A6, GA1, GB1, GB6, GH1, A2, C7, H7, SH-A4, SH-A9, RG1H11, and RG6B), WO2014/179664 (including 9A2, 10B11, 6E9, APE1922, APE1923, APE1924, APE1950, APE1963 and APE2058), WO2014/206107 (including clone 1, 10, 11, 55, 64, 38, 39, 41 and 48), WO2012/135408 (including h409A11, h409A16, and h409A17), WO2012/145493 (including antibodies 1E3, 1E8, 1H3 and h1H3 Var 1 to h1H3 Var 14), WO2011/110621 (including antibody 949 and the modified versions disclosed in FIGS. 1 to 11), WO2011/110604 (including antibody 948 and the modified versions disclosed in FIGS. 3 to 11), WO2010/089411 (including CNCM deposit number 1-4122, 1-4080 or 1-4081), WO2010/036959 (including the antibodies in Table 1 of Example 1), WO2010/029435 & WO2010/029434 (including clones 2, 10 and 19), WO2008/156712 (including hPD-1.08A, hPD-1.09A, h409A11, h409A16 and h409A17 and the antibodies described in Example 2, Table H, Example 4 and table IV), WO2006/121168 (including clones 17D8, 4H1, 5C4, 4A11, 7D3, 5F4, and 2D3), WO2004/004771 or WO2004/056875 (including PD1-17, PD1-28, PD1-33, PD1-35, PD1-F2 and the Abs described in Table 1); the sequences and features of the anti-PD-1 antibodies are incorporated herein by reference.

[0843] In one embodiment, the antigen-binding site specifically binds CTLA-4, e.g. hCTLA-4. In one embodiment, the CTLA-4 antigen-binding site comprises the CDRH1, CDRH2, CDRH3, CDRL1, CDRL2 and CDRL3, or the V_{H}, or the V_{L} or the V_{H} and V_{L} region from ipilimumab (MDX-010, CAS No. 477202-00-9), tremelimumab (ticilimumab/CP-675,206), antibody clone 2F1, clone 1F4 (Abnova Corporation), clone 9H10 (EMD Millipore), clone BNU3 (GeneTex), clone 1 E2, clone AS32 (Lifespan Biosciences) clone A3.4H2.H12 (Acris Antibodies), clone 060 (Sino Biological), clone BU5G3 (Creative Diagnostics), clone MIH8 (MBL International), clone A3.6B10.G1, or clone L3D10 (BioLegend) or from any one of the anti-CTLA-4 antibodies described in WO2017/087588 (ISVs disclosed in FIG. 2), WO2017/084078 (clones C2, C4, C10, C11, C12 and C13, and FIGS. 4-7), WO2016/196237 (including AGEN1884w, AGEN2041w, the sequences in FIGS. 19A, 19B and Tables 1-6), WO2016/130986 & WO2016/130898 (including E8, F7 and the Abs described in Table 4), WO2016/015675 (including hybridoma LT001 and anitbodies 8D2, 8D2H1L1, 8D2H2L2, 8D2H3L3, 8D2H2L15 and 8D2H2L17), WO2012/120125 (including 3610, 8H5, and the Abs identified in Examples 1, 2, 3 and 5), WO2010/097597 (including JMW-3B3 and the variants and fragments disclosed), WO2009/100140 (including 10D1, 1H5, 3A4, 6C10 and the antibodies described in FIGS. 1 to 6), WO2007/008463 & WO2006/101692 & WO2006/101691 & WO2006/048749 & WO2005/09238, (including 4.1.1, 4.8.1, 4.10.2, 4.13.1, 4.14.3, 6.1.1, 11.2.1, 11.6.1, 11.7.1, 12.3.1.1, 12.9.1.1, and 10D1), WO2006/096491 (including ATCC Deposit No. 11.2.1 11.2.1.4 PTA-5169 and 4.1.1 4.1.1.1 PTA-5166), WO2006/066568 (including TGN2122.C, TGN2422.C, 4.8H10H5 and 4.3F6B5 and the antibodies described in tables 3 to 14), WO2006/029219 (including L3D10, L1B11, K4G4, KM10, and YL2), WO2004/029069 (including ATCC deposit number PTA-4537), WO01/54732 (including antibodies 25, 26, 27, 29, 33, 34, 35, 36 and 38), WO01/14424 (including 3A4, 9A5, 2E2, 2E7, 4B6, 4E10, 5C4, 5G1, 11E8, and 11G1 and the antibodies identified in Examples 3 and 4 and table 3) and WO00/37504 (including 3.1.1, 4.1.1, 4.8.1, 4.10.2, 4.13.1, 4.14.3, 6.1.1, 11.2.1, 11.6.1, 11.7.1, 12.3.1.1, and 12.9.1.1); the sequences and features of the anti-CTLA-4 antibodies are incorporated herein by reference.

[0844] In one embodiment, the antigen-binding site specifically binds TIGIT, e.g. human TIGIT. In one embodiment, the TIGIT antigen-binding site comprises the CDRH1, CDRH2, CDRH3, CDRL1, CDRL2 and CDRL3, or the V_{H}, or the V_{L} or the V_{H} and V_{L} region from RG-6058 (MTIG-7192A) or from any one of the anti-TIGIT antibodies described in WO2017/053748 (including 1A4, 1D3, 4A3, 10A7, 4.1D3.Q1E, h10A7.K4G3, 4.1D3 and the other antibodies described in Examples 1 and 2), WO2017/037707 (including VSIG9#1 and 258-csl #4), WO2017/030823 (including 14D7, 26610 and humanized versions in Example 3), WO2016/191643 (including 313R11, 313R12, 313R14, 313R19, 313R20, ATCC PTA-122180 and ATCC PTA-122181), WO2016/106302 (including 1462, 13E6, 6F9, 11G11, 10C9, 16F6, 11C9, 27A9, 10D7, 20G6, 24E8, 24G1, 27F1, 15A6, 4E4, 13D1, 9B11, 10B8, 22G2, 19H2, 8C8, 17G4, 25E7, 26D8 and 16A8), WO2016/028656 (including 14A6, 28H5 or 31C6 and humanized versions from Example 6), and WO2009/126688 (US2013/0251720, including 10A7 and 1F4); the sequences and features of the anti-TIGIT antibodies are incorporated herein by reference.

[0845] In one embodiment, the antigen-binding site specifically binds TIM-3, e.g. human TIM-3. In one embodiment, the TIM-3 antigen-binding site comprises the CDRH1, CDRH2, CDRH3, CDRL1, CDRL2 and CDRL3, or the V_{H}, or the V_{L} or the V_{H} and V_{L} region from F38-2E2 (BioLegend), clone 2E2 (Merck Millipore), clone 666E2, clone 024 (Sino Biological) clone 344801 (R&D Systems), clone E-18, clone H-191 (Santa Cruz Biotechnology), or clone 13A224 (United States Biological), TSR-022 (Tesaro) or from any one of the anti-TIM-3 antibodies described in WO2017/079115 (including anti-TIM3 antibodies listed in tables 30-38), WO2017/055404 (including PD1TIM3-0389, PD1TIM3-0168, PD1TIM3-0166, TIM3-0038, TIM3-0018, TIM3-0028, TIM3-0438—Table C), WO2017/031242 (Table 10), WO2016/179194 (including antibodies in FIG. 1b, including mAb F38-2E2 and 2E2), WO2016/171722 (including 344823 and antibodies from the hybridomas 7D11, 10G12, 11G8, 8B.2C12 and 25F.1D6), WO2016/161270 (including APE5137 and APE5121), WO2016/111947 (including mAb5, mAb13, mAb15, mAb17, mAb21, mAb22, mAb26, mAb27, mAb48, mAb58 and mAb91), WO2016/071448 (including TIM3-0016, TIM3-0018, TIM3-0021, TIM3-0022, TIM3-0026, TIM3-0028, TIM3-0030, TIM3-0033, TIM3-0038, TIM3-0433, TIM3-0434, TIM3-0438 and TIM3-0443), WO2016/068802 (including 1B9, 1H9, 1H10, 2C7, 2F4, 2G6, 1D9, 1F4 and 2C8—FIGS. 1, 2 & 3), WO2016/068803 (including A3, B10, G6, G7, G9, All and A11_gl—FIGS. 1, 2 & 3), WO2015/117002 (including ABTIM3, ABTIM3-hum02, ABTIM3-hum05, ABTIM3-hum06, ABTIM3-hum09, ABTIM3-hum10, ABTIM3-hum12, ABTIM-hum01, ABTIM-hum04, ABTIM3-hum07, ABTIM3-hum08, ABTIM3-hum04, ABTIM3-hum21, ABTIM3-hum03, ABTIM3-hum11 and antibodies listed in Table 9), WO2015/048312 (including 5D12), WO2014/022332 (including 2C12), WO2013/006490 (including antibodies in Table 1), WO2011/155607 (including 512, 644, 4545, 4177, 8213, 344823 and 34823), WO2003/063792 (including antibody 8B.2C12 and 25F.1D6), WO2017/019897 (including antibody molecules disclosed in Tables 1-4, including ABTIM3, ABTIM3-hum20, ABTIM3-hum22 and ABTIM3-hum23), WO2016/079050 & WO2016/079050 (including Tim3_0022, Tim3_0016, Tim3_0018, Tim3_00122, Tim3_0022, Tim3_0021, Tim3_0028, Tim3_0026, Tim3_0033, Tim3_0038, Tim3_0030, 1.7. E10, F38-2EL and 27-12E12); the sequences and features of the anti-TIM-3 antibodies are incorporated herein by reference.

[0846] In one embodiment, the antigen-binding site specifically binds LAG-3, e.g. human LAG-3. In one embodiment, the LAG-3 antigen-binding site comprises the CDRH1, CDRH2, CDRH3, CDRL1, CDRL2 and CDRL3, or the V_{H}, or the V_{L} or the V_{H} and V_{L} region from antibody clone 17B4 (Enzo Life Sciences), or clone 333210 (R&D Systems), or clone 14L676 (United States Biological), or C9B7W (PharMingen), or 11E, or IMO321, or mAb C9B7W (BioXcell) or from any one of the anti-LAG-3 antibodies described in WO95/30750, WO2004/078928, WO2008/132601 (including IMP731 Lag-3 Ab, IMP321, A9H12 Lag-3 mAb and 31G11), WO2010/019570 (including 25F7, 26H10, 25E3, 8B7, 11F2 and 17E5), WO2014/140180 (including H5L7, H5L7BW, IMP731 and antibodies in Tables 3 & Table 7), WO2014/179664 (including APE03109), WO2014/008218 (including Lag3.1, Lag3.5, Lag3.6, Lag3.7 and Lag3.8), WO2015/042246, WO2015/116539 (including BMS-986016), WO2015/138920 (including BAP050-hum01 to BAP050-hum20, huBAP050(Ser), BAP050-hum01-Ser to BAP050-hum20-Ser, BAP050-Clone-F, BAP050-Clone-G, BAP050-Clone-H, BAP050-Clone-I, BAP050-Clone-3, BAP050 and BAP050-chi), WO2015/198312, WO2016/028672 (including Abl, Ab2, Ab3, Ab4, Abs, Ab6, Ab7, Ab8 and Ab9), WO2016/126858, WO2016/200782 (including LAG-3 mAb1 to LAG-3 mAb6), WO2017/015560 (including L32D10, L3E3, L3C5, L35D4, L35G6, L33H11, L32A9, L32A4, L3A1 and the antibodies listed in Table 3), WO2017/062888 (including mAb1, H4H15477P, H4H15483P, H4H15484P, H4H15491, H4H17823P, H4H17826P2, H4H17828P2, H4sH15460P, H4sH15462P, H4sH15463P, H4sH15464P, H4sH15466P, H4sH15467P, H4sH15470P, H4sH15475P, H4sH15479P, H4sH15480P, H4sH15482P, H4sH15488P, H4sH15496P2, H4sH15498P2, H4sH15505P2, H4sH15518P2, H4sH15523P2, H4sH15530P2, H4sH15555P2, H4sH15558P2, H4sH15567P2 and H4H17819P), WO2017/019894, WO2017/037203 (including 8E2, 13E2, 34F4, 17B4 and IMP761), WO2017/087589 (including 11609) or WO2017/087901; the sequences and features of the anti-LAG-3 antibodies are incorporated herein by reference.

[0847] In one embodiment, the antigen-binding site specifically binds VISTA, e.g. human VISTA. In one embodiment, the VISTA antigen-binding site comprises the CDRH1, CDRH2, CDRH3, CDRL1, CDRL2 and CDRL3, or the V_{H}, or the V_{L} or the V_{H} and V_{L} region from any one of the anti-VISTA antibodies described in WO2016/207717 & WO2015/097536 (including VSTB50, VSTB53, VSTB60, VSTB95, VSTB112, VSTB116, VSTB174, VSTB175, VSTB149, VSTB140 and the antibodies in Table 1A and Examples 7 and 8) and WO2014/190356 (including clone 2D3 and 18C3); the sequences and features of the anti-VISTA antibodies are incorporated herein by reference.

[0848] In one embodiment, the antigen-binding site specifically binds an immune modulator. In one embodiment, the antigen-binding site specifically binds an immune modulator selected from BTLA, hHVEM, CSF1R, CCR4, CD39, CD40, CD73, CD96, CXCR2, CXCR4, CD200, GARP, SIRPα, CXCL9, CXCL10, CXCL11 and CD155, or from BTLA, hHVEM, CSF1R, CCR4, CD39, CD40, CD73, CD96, CXCR2, CXCR4, CD200, GARP, SIRPα, CXCL9, CXCL10 and CD155. In one embodiment, the antigen-binding site specifically binds an immune modulator selected from GARP, SIRPα, CXCR4, BTLA, hVEM and CSF1R.

[0849] In one embodiment, the antigen-binding site specifically binds GARP, e.g. human GARP. In one embodiment, the GARP antigen-binding site comprises the CDRH1, CDRH2, CDR3, CDRL1, CDRL2 and CDRL3, or the V_{H}, or the V_{L} or the V_{H} and V_{L} region from G14D9, Plato-1, 272, G6, 50 G10 or 7B11 or from any of one of the anti-GARP antibodies described in WO2007/113301 & WO2015/015003 (including MHGARPB, LHG-10, LHG-10-D, LHG-10.3-D, LHG-10.4-D, LHG-10.5-D, LHG-10.6-D, LHG-10.3, LHG-10.4, LHG-10.5, LHG-10.6, 27E10, MHGARP1, MHGARP2, MHGARP3, MHGARP4, MHGARP5, MHGARP6, MHGARP7 and MHGARP9), WO2017/051888 (including 110F, 105F, c151D, c198D, h198D, h151D, h151D-H1L1 and h198D-H3L4); the sequences and features of the anti-GARP antibodies are incorporated herein by reference.

[0850] In one embodiment, the antigen-binding site specifically binds SIRPα, e.g. human SIRPα. In one embodiment, the SIRPα antigen-binding site comprises the CDRH1, CDRH2, CDRH3, CDRL1, CDRL2 and CDRL3, or the V_{H}, or the V_{L} or the V_{H} and V_{L} region from ED9 (ThermoFisher), or 602411 (Novus Biologicals), or from any one of the anti-SIRPα antibodies described in WO97/48723, WO00/24869 (including 10C4), WO00/66159 (including ED9 and ED17), WO01/40307, WO02/092784 (including SE5A5, SE7C2 and SE12C3), WO2004/108923 (including SE12C3 and 2F34), WO2009/046541 (including P84), WO2011/076781, WO2012/172521, WO2012/040207 (including SE5A5 and mouse P84), WO2013/056352 (including 29-AM4-5, Ab AM4-5, AM5-1, AM5-3, AM5-5, AM5-6, SIRPalpha-AM3-35, AM4-1, SIRP29-AM3-35, SIRP29-AM4-5, SIRP29-AM4-1, 29-AM2-2, 29-AM4-4, 29-AM4-1, 29-AM4-5, 29-AM3-35 and SIRP29-AM3-63), WO2016/063233, WO2016/205042 (including P362) or WO2015/138600 (including KWAR23); the sequences and features of the anti-SIRPα antibodies are incorporated herein by reference.

[0851] In one embodiment, the antigen-binding site specifically binds CXCR4, e.g. human CXCR4. In one embodiment, the CXCR4 antigen-binding site comprises the CDRH1, CDRH2, CDRH3, CDRL1, CDRL2 and CDRL3, or the V_{H}, or the V_{L} or the V_{H} and V_{L} region of ulocuplumab/BMS-936564, clone 44717.111 or PF-06747143 or from any one of the anti-CXCR4 antibodies described in WO97/49424 (including MAB12G5), WO99/50461, WO01/42308, WO03/066830 & WO2003/066830 (including Ab124 and Ab125), WO2004/059285 (including ALX40-4C), WO2006/089141 (including mAbs 2N, 6R, 18, 19, 20, 33 and 48), WO2007/005605, WO2008/142303 (including MAB170, MAB171, MAB173 and MAB172), WO2008/060367 & WO2013/071068 & WO2015/015401 (including BMS-936564/MDX-1338), WO2009/140124 (including antibody I, II, III, IV and V), WO2009/117706 (including 701, 708, 716, 717, 718 and 4G10), WO2011/161266 (including 4CXCR100, 4CXCR103, 4CXCR104, 4CXCR101, 4CXCR238D2 and 4CXCR238D4), WO2011/098762 (including C-9P21 (Table 1), B-1M22 (Table 2), C1124 (Table 3), D-1K21 (Table 4) and 9N10 (Table 5)), WO2012/175576, WO2013/013025 (including 2A4, 6C7, 4C1, 7C8, 5C9 and 5E1), WO2013/017566 (including Mab 427aB1 and 515H7), WO2013/017562 (including 1-3859 Mab and 515H7), WO2015/069874 (including antibodies corresponding to Seq ID numbers 25 and 29), WO2015/015401 (including 12A11, 6B6, 3G10, m3G10.hIgG1, m3G10.hIgG4, h3G10.A57.hIgG1, h3G10.A57.A58A.hIgG1, h3G10.1.91.A58A.hIgG1, h3G10.1.91.A58B.hIgG1 and h3G10.2.37.2.72.hIgG1), WO2016/156570 (including 281F12, 281A6 and 281D4), WO2016/109872 (including antibodies listed in tables 1, 2, 9 & 12, M3-114-6H, AM4-272-6H, AM3-523-6H, AM4-272, AM3-114, AM3-523, AM4-746 and AM4-1121), WO2017/071625, WO2012/175576, WO2010/125162 & WO2012/055980 & WO2011/121040 & WO2010/037831 (including c414H5 (414H5), c515H7 (515H7) and 301aE5), WO2009/138519 (including ALX40-4C, 238D2, 238D4, 237B5 antibodies and sequences listed in table 1, table 1.1, table A-I, table B-1.1 & B-5), WO2011/042398 (including 238D2 and 238D4), WO2011/083140 (including those disclosed in Tables C-2, C-3, C-4 & C-5, FIG. 2 and ALX-0651, 15H3, 10E12, 10G10, 238B6, 10E9, 281E10, 10A10, 14A2 and 15A1) or WO2011/083141; the sequences and features of the anti-CXCR4 antibodies are incorporated herein by reference.

[0852] In one embodiment, the antigen-binding site specifically binds BTLA, e.g. hBTLA. In one embodiment, the BTLA antigen-binding site comprises the CDRH1, CDRH2, CDRH3, CDRL1, CDRL2 and CDRL3, or the V_{H}, or the V_{L} or the V_{H} and V_{L} region from antibody clone 1B7, clone 2G8, clone 4C5 (Abnova Corporation), clone 4B8 (antibodies-online), clone MIH26 (Thermo Scientific Pierce Antibodies), clone UMAB61 (OriGene Technologies), clone 330104 (R&D Systems), clone 1B4 (Lifespan Biosciences), clone 440205, clone 5E7 (Creative Diagnostics) or from any one of the anti-BTLA antibodies described in WO2016/176583 (including clone 6F4), WO2011/014438 (including 8D5, 8A3, 20H4, 21H6, 15C5, 19A7 and 4C7), WO2010/106051 (including CNCM deposit number 1-4123) and WO2008/076560 (including 1B4, E4H9, 3C2, 3C2a, 6A5, 11E2, E8D9, 10H6 and 4C9 as detailed in Example 2); the sequences and features of the anti-BTLA antibodies are incorporated herein by reference.

[0853] In one embodiment, the antigen-binding site specifically binds hVEM, e.g. human hVEM. In one embodiment, the HVEM antigen-binding site comprises the CDRH1, CDRH2, CDRH3, CDRL1, CDRL2 and CDRL3, or the V_{H}, or the V_{L} or the V_{H} and V_{L} region from any one of the anti-HVEM antibodies described in WO2008/083169 (including LBH1); the sequences and features of the anti-BTLA antibodies are incorporated herein by reference.

[0854] In one embodiment, the antigen-binding site specifically binds CSF1R. In one embodiment, the CSF1R antigen-binding site comprises the CDRH1, CDRH2, CDRH3, CDRL1, CDRL2 and CDRL3, or the V_{H}, or the V_{L} or the V_{H} and V_{L} region from any one of the anti-CSF1R antibodies described in WO2009/026303 (including 1.2, 1.109, 2.360 and 1.2.SM and the antibodies in FIGS. 1 and 2), WO2009/112245 (including CXIIG6), WO2011/070024 (including Mab 2F11, 2E10, 2H7 and 1G10, and their derivatives), WO2011/107553 (including 7H5.2G10/DSM ACC2922), WO2011/123381 (including antibody 1 and antibody 2), WO2011/131407 (including 7G5.3B6/DSM ACC2921), WO2011/140249 (including 0301, 0302, and 0311 their derivatives and the antibodies in tables 2, 3 and 5), WO2013/169264 & WO2014/036357 & WO2016/106180 & WO2016/168149 (including huAb1 to huAb16), WO2012/110360 & WO2013/057281 (including CXIIG6, H19K12, H27K5 and H27K15 and the humanised antibodies of tables 1 and 2), WO2013/087699 (including 9D11.2E8 and 10H2.2F12), WO2014/072441 (including H27K15), WO2014/173814 & WO2013/132044 (including Mab 2F11, Mab 2E10, Mab 2H7, Mab 1610 and sc2-4A5 and the antibodies in Table 3 and 3b), WO2015/028455 & WO2015/028454 (including Ab535, Ab969, and derivatives, e.g. Ab969.g2), WO2015/036511 & WO2016/207312 (including 2F11, 2E10 and the derivatives described in embodiment 33) and WO2017/049038 (including ALM-423 and the antibodies listed in Table 2); the sequences and features of the anti-CSF1R antibodies are incorporated herein by reference.

[0855] In one embodiment, the antigen-binding site specifically binds CD39, e.g. human CD39. In one embodiment, the CD39 antigen-binding site comprises the CDRH1, CDRH2, CDRH3, CDRL1, CDRL2 and CDRL3, or the V_{H}, or the V_{L} or the V_{H} and V_{L} region from BY40, BY12, BA54g (Biolegend), BU61 (Santa Cruz Biotech), A1 (Ebiosciences), AC2 (Immunotech), 22A9 (Abcam), 24DMS1 or any one of the anti-CD39 antibodies described in WO96/32471, WO00/04041, WO01/10205 (including CD39L4), WO2009/09547 (including CNCM-I-3889/BY40), WO2014/169255, WO2012/085132 (including antibodies VY12, BY40 and BA54g), WO2016/073845 (including R29-5-13A, R29-5-71A, R29-5-165C and R29-9-8B), WO2017/089334 (including 1-391, 1-392 and antibodies produced from hybridomas 1-3889 and CNCM 1-41171) and WO2009/095478; the sequences and features of the anti-CD39 antibodies are incorporated herein by reference.

[0856] In one embodiment, the antigen-binding site specifically binds CD40, e.g. human CD40. In one embodiment, the CD40 antigen-binding site comprises the CDRH1, CDRH2, CDRH3, CDRL1, CDRL2 and CDRL3, or the V_{H}, or the V_{L} or the V_{H} and V_{L} region from BMS3h-56-269, CP-870,893, dacetuzumab, SEA-CD40, ADC-1013, R07009789 and Chi Lob 7/4, or from any one of the anti-CD40 antibodies described in WO2017/059243, WO2017/059196, WO2017/040932, WO2017/040566, WO2017/004016, WO2017/004006, WO2016/196314, WO2016/028810, WO2016/023960, WO2016/023875, WO2015/134988, WO2015/091853, WO2014/070934, WO2014/065403, WO2014/065402, WO2014/04298, WO2013/164789, WO2013/034904, WO2012/149356, WO2012/145673, WO2012/125569, WO2012/111762, WO2012/075111, WO2012/065950, WO2012/041635, WO2011/123489, WO2010/123012, WO2010/104761, WO2010/121231, WO2009/062125, WO2010/104747, WO2010/104748, WO2010/104749, WO2010/024676, WO2009/094391, WO2009/062054, WO2008/091954, WO2007/130493, WO2007/129895, WO2007/124299, WO2007/053767, WO2007/053661, WO2006/128103, WO2006/073443, WO2005/063981, WO2005/063289 (US2012/0263732), WO2005/044855, WO2005/044306, WO2005/044294, WO2005/044307, WO2005/044304, WO2005/044854, WO2005/044305, WO03/040170 (U.S. Pat. Nos. 7,563,442B, 7,618,633B, 7,338,660B, 7,288,251B, 7,626,012B, 8,388,971B, US2013/0024956), WO03/029296, WO02/088186, WO01/83755, WO02/28905, WO02/28480, WO02/28481, WO02/28904, WO01/37870, WO01/16180, WO00/75348 WO99/61057, WO99/42075, WO97/31025, WO95/17202 and WO95/09653; the sequences and features of the anti-CD40 antibodies are incorporated herein by reference.

[0857] In one embodiment, the antigen-binding site specifically binds CD73, e.g. human CD73. In one embodiment, the CD73 antigen-binding site comprises the CDRH1, CDRH2, CDRH3, CDRL1, CDRL2 and CDRL3, or the V_{H}, or the V_{L} or the V_{H} and V_{L} region from 1E9 (Santa Cruz Biotechnology), AD2, 7G2, 4G4 or from any one of the anti-CD73 antibodies described in WO2017/064043 (including 7H10, 12F9, 15D7, 4B11, 11D9 and 9D2), WO2016/081748 (including 4C3, 7A11, 6E11, 5F8, 4C3, 11F11, 11A6, CD73.4-1, CD73.4-2, CD73.3, 11F11-1, 11F11-2, 11F11, 4C3-1, 4C3-2, 4C3-3, 4D4, 10D2-1, 10D2-2, 11A6, 24H2, 5F8-1, 5F8-2 and 5F8-3), WO2016/131950 (including 11E1, 8C7, 3C12 and 6E1), WO2016/075176 (including MEDI9447, clone 10.3 and clone 2C5) & WO2016/075099 (including CD730004, CD730008, CD7300011, CD730021, CD730042, CD730046, CD730047, CD730068 and CD730069), WO2016/055609 (including 11E1, 6E1, 3C12 and 8C7); the sequences and features of the anti-CD73 antibodies are incorporated herein by reference.

[0858] In one embodiment, the antigen-binding site specifically binds CD96, e.g. human CD96. In one embodiment, the CD96 antigen-binding site comprises the CDRH1, CDRH2, CDRH3, CDRL1, CDRL2 and CDRL3, or the V_{H}, or the V_{L} or the V_{H} and V_{L} region of 6A6, or NK92.39 (E bioscience), 1C8, 3H8, MAA6359 or from any one of the anti-CD96 antibodies described in WO2008/073316, WO2009/007124, WO2013/184912, WO2014/089169, WO2014/149310 (including antibody 3.3), WO2015/024060 or WO2015/024042, WO2015/024060 (including mAb 3.3); the sequences and features of the anti-CD96 antibodies are incorporated herein by reference.

[0859] In one embodiment, the antigen-binding site specifically binds CXCR2, e.g. human CXCR2. In one embodiment, the CXCR2 antigen-binding site comprises the CDRH1, CDRH2, CDRH3, CDRL1, CDRL2 and CDRL3, or the V_{H}, or the V_{L} or the V_{H} and V_{L} region from any one of the anti-CXCR2 antibodies described in WO2015/169811 (including HY29 and HY29GL), WO2014/170317 (including CX2-Mab #1 to #19), WO2012/062713, WO2013/168108 (including 163D2-127D1, 163E3-127D1, 163E3-54B12, 163D2-54B12, 2B2-163E3, 2B2-163D2, 97A9-2B2, 97A9-54B12, 127D1-163D2, 127D1-163E3, 2B2-97A9, 54B12-163D2, 54B12-163E3, 163D2-2B2, 163E3-2B2, 127D1-97A9, 54B12-97A9, 97A9-127D1 and derivatives thereof), WO2009/117706 (including 48311.211, 5E8/CXCR2, clone 19 and derivatives thereof), WO2009/120186 (including RII115, 48311 and derivatives thereof) and WO2002/26249; the sequences and features of the anti-CXCR2 antibodies are incorporated herein by reference.

[0860] In one embodiment, the antigen-binding site specifically binds CD200, e.g. human CD200. In one embodiment, the CD200 antigen-binding site comprises the CDRH1, CDRH2, CDRH3, CDRL1, CDRL2 and CDRL3, or the V_{H}, or the V_{L} or the V_{H} and V_{L} region from DX-109, samalizumab/ALXN-6000, TTI-200.7 or from any one of the anti-CD200 antibodies described in WO99/24565 (including M3B5 and the antibodies in Examples 4 and 5), WO02/11762 (including 3B6 and the antibodies in the Examples), WO2004/060295 (US2004/0213783), WO2004/078938 (including scFv-9), WO2006/020266 (U.S. Pat. No. 8,840,885B2, including CG1R3A10, cG2aR3A10, cG2aR3B7, dGIR3A5, dGIR3B5, and dGIR3B10 and the antibodies described in FIGS. 9A-9C, FIGS. 21A and 21B), WO2007/084321 (U.S. Pat. No. 8,709,415B2, including ALXN5200, hB7VH3VL2, C2aB7G1, C2aB7G2/G4, V3V2-G1 and V3V2-G2/G4), WO2009/014745 (including OX90mG2a (FIG. 10), OX90NE and OX90NE-AG), and WO2011/100538 & US2013/0189258 (including Antibody 1 and Antibody 2); the sequences and features of the anti-CD200 antibodies are incorporated herein by reference.

[0861] In one embodiment, the antigen-binding site specifically binds CCR4, e.g. human CCR4. In one embodiment, the CCR4 antigen-binding site comprises the CDRH1, CDRH2, CDRH3, CDRL1, CDRL2 and CDRL3, or the V_{H}, or the V_{L} or the V_{H} and V_{L} region from mogamulizumab, KM3060 (see Niwa et al., 2004, Cancer Research 64, 2127-2133), and KW-0761 (see Ishida et al., Annals of Oncology 2008, vol 19, supplement 4, 513) or from any one of the anti-CCR4 antibodies described in WO2016/178779 & WO2016/057488 (including mAb2-3, 1-44, 1-49, 2-1 and 2-2), WO2015/179236 (including KW-0761), WO2013/166500 (including mAb1567, c1567, h1567, mAb 1-4 and 2-3 and the antibodies in Examples 6 and 13), WO2012/076883 (including antibodies 208, 306, 308, 406, 501, 503, 601, 603 and 803—Tables 1-9), WO2010/142952 (including 17G, 9E, 11F, 9E10, 9E103 and 9E1D—see Tables 1-16), WO2009/086514 (including mAb1567 and the humanised mAbs in Example 14), WO2005/035582 (including the DG44/CCR4 antibody and the Ms705/CCR4 antibody (FERM BP-8467)), WO2005/053741 & WO01/64754 (U.S. Pat. Nos. 6,989,145B, 7,666,418B, 8,197,814B, 8,632,996B, including KM2160 (FERM BP-10090), KM2760 (FERM deposit BP-7054)), WO2003/018635 (including KM2160, KM8759 (FERM BP-8129) and KM8760 (FERM BP-8130), WO00/42074 (U.S. Pat. Nos. 6,488,930B, 7,138,117B, including 2B10, 10E4, 1G1 and the antibodies deposited as ATCC accession number HB-12624 and HB-12625) and WO00/41724 (U.S. Pat. Nos. 6,881,406B, 6,245,332B, including 1G1 and the antibody deposited under ATCC accession number HB-12624); the sequences and features of the anti-CCR4 antibodies are incorporated herein by reference.

[0862] In one embodiment, the antigen-binding site specifically binds CXCL9, e.g. human CXCL9. In one embodiment, the CXCL9 antigen-binding site comprises the CDRH1, CDRH2, CDRH3, CDRL1, CDRL2 and CDRL3, or the V_{H}, or the V_{L} or the V_{H} and V_{L} region from mAb 392-100 or AF392 (R&D Systems).

[0863] In one embodiment, the antigen-binding site specifically binds CXCL10, e.g. human CXCL10. In one embodiment, the CXCL10 antigen-binding site comprises the CDRH1, CDRH2, CDRH3, CDRL1, CDRL2 and CDRL3, or the V_{H}, or the V_{L} or the V_{H} and V_{L} region of mAb266 (R & D systems) or from any one of the anti-CXCL10 antibodies described in WO017/8708 (including CR.G (IP-10) (IgG1) (PharMingen) ande IP-10 (IgG)(A.Luster), WO02/15932, WO03/006045, WO2004/082714, WO2004/045525, WO2004/045526, WO2004/101511 (including antibodies in table 1 and AIP12, HuAIP12, MuAIP12, AIP13, HuAIP13, MuAIP13, AIP6, AIP8, AIP14, AIP18, AIP21, AIP22, AIP5 and AIP17), WO2005/060457 (including AIP5, AIP6, AIP8, AIP10, AIP12, AIP13, AIP14, AIP17, AIP18, AIP21, AIP22, AIP32 and AIP36), WO2005/011605, WO2005/023201, WO2005/058815 (including 1D4, 1E1, 2G1, 3C4, 6A5, 6A8, 6B10, 7C10, 8F6, 10A12 and 10A12S13C4), WO2005/084708, WO2006/039819, WO2006/118085, WO2008/047486, WO2008/044824 (including antibodies #124, #31, #28, #43 and #137), WO2008/106200, WO2009/023566, WO2012/149320 (including MSX-1100 and 6A5), WO2014/003742 (including the antibody of Example 14), WO2013/170735, WO2014/189306, WO2015/063187; the sequences and features of the anti-CXCL10 antibodies are incorporated herein by reference.

[0864] In one embodiment, the antigen-binding site specifically binds CD155, e.g. human CD155. In one embodiment, the CD155 antigen-binding site comprises the CDRH1, CDRH2, CDRH3, CDRL1, CDRL2 and CDRL3, or the V_{H}, or the V_{L} or the V_{H} and V_{L} region from clone SKII.4 (BioLegend).

[0865] In one embodiment, the antigen-binding site specifically binds an immune activator. In one embodiment, the antigen-binding site specifically binds an immune activator selected from CD137, GITR, OX40, CD40, CXCR3 (e.g. agonistic activity against CXCR3), CD3 and ICOS (e.g. agonistic activity against ICOS). In one embodiment, the antigen-binding site specifically binds an immune activator selected from ICOS, CD137, GITR and OX40.

[0866] In one embodiment, the antigen-binding site specifically binds CD137, e.g. hCD137. In one embodiment, the CD137 antigen-binding site comprises the CDRH1, CDRH2, CDRH3, CDRL1, CDRL2 and CDRL3, or the V_{H}, or the V_{L} or the V_{H} and V_{L} region from urelumab, BMS-663513, PF-05082566 (Pfizer), 1D8 and 3E1, 4B4 (BioLegend 309809), H4-1BB-M127 (BD Pharmingen 552532), BBK.2 (Thermo Fisher M S621PABX), 145501 (Leinco Technologies B591), the antibody produced by cell line deposited as ATCC No. HB-11248 (U.S. Pat. No. 6,974,863) or XmAb-5592, or from any one of the anti-CD137 antibodies described in WO2017/04945, WO2016/134358, WO2015/179236, WO2012/177788, WO2012/145183, WO2012/032433, WO2009/135019, WO2005/035584, U.S. Pat. No. 6,974,863, WO2004/055513 and WO2004/010947; the sequences and features of the anti-CD137 antibodies are incorporated herein by reference.

[0867] In one embodiment, the antigen-binding site specifically binds GITR, e.g. hGITR. In one embodiment, the GITR antigen-binding site comprises the CDRH1, CDRH2, CDRH3, CDRL1, CDRL2 and CDRL3, or the V_{H}, or the V_{L} or the V_{H} and V_{L} region from MK4166, TRX518, TRX385, MAB689 (R & D Systems), YGITR765 (Novus Biologicals) or 1D8 (Novus Biologicals), or from any one of the anti-GITR antibodies described in WO2015/187835 (including 28F3, 3C3-1, 3C3-2, 2G6, 8A6, 9G7-1, 9G7-2, 14E3, 19H8-1, 19H8-2, 19D3, 18E10, and 6G10), WO2015/184099 (including 1042-7, 32-15, 1039-45, 1333-21, 231-1039-45, 231-32-15, Hum231#1, Hum231#2, m6C8, pab1964, to pab1973, pab1975 to pab1977, pab1979 to pab1981, pab1983, pab2159, pab2160, pab2161 and the antibodies in tables 1 and 2), WO2015/031667 (including antibodies Ab1 to Ab59 in table 1), WO2015/026684 (including an antibody with a CDR sequence of Seq ID 1-66), WO2013/039954 (including, 2155, 1718, 1649, 1362, 954, 827, 698, 706 and antibodies listed in Tables 1 & 3), WO2011/051726 (including antibodies containing CDRs a-f listed on page 17), WO2011/028683 (including antibodies 36E5, 61F6, 61G6, 3D6, 6H6, 1D8, 17F10, 35D8, 49A1, 9E5, 31H6 and antibodies from hybridomas PTA-9889, PTA-9890, PTA-9891, PTA-9892, PTA-9893, PTA-10286, PTA-10287, PTA-10288, PTA-10289, PTA-10290, and PTA-10291), WO2009/009116 (including antibody 2F8), WO2007/133822 (including antibodies listed in Table 1), WO2006/105021 (including 6C8, 2F8, HuN6C8-Agly, HuQ6C8-Gly, and HuQ6C8-Agly), WO2006/050172 & WO2004/084942 (including DTA-1), WO03/006058 (including anti-GITR/TNFRSF18# AF524), WO2016/054638 (including mAb #1-81, #3-167, #5-139, #7-192, #10-116, #11-126, #12-46, #13-169, #14-182, #15-68 and #17-60), WO2016/196792 (including 6G10, 28F3, 19D3, 18E10, 3C3, 2G6, 8A6, 9G7, 14E3 and 19H8), WO2017/087678 (including 28F3, 19D3, 18E10, 3C3-1, 3C3-2, 2G6, 8A6, 9G7-1, 9G7-2, 14E3, 19H8-1, 19H8-2 and 6G10); the sequences and features of the anti-GITR antibodies are incorporated herein by reference.

[0868] In one embodiment, the antigen-binding site specifically binds OX40, e.g. hOX40. In one embodiment, the OX40 antigen-binding site comprises the CDRH1, CDRH2, CDRH3, CDRL1, CDRL2 and CDRL3, or the V_{H}, or the V_{L} or the V_{H} and V_{L} region from GSK3174998, L106 BD (Pharmingen Product #340420), ACT35 (Santa Cruz Biotechnology, Catalog #20073), MOXR0916, MEDI-6469, MEDI-0562, 9612 (Weinberg, A. D., et al., 3 Immunother 29, 575-585 (2006)), the humanised anti-OX40 Ab described in Morris et al., Mol Immunol. May 2007; 44(12):3112-3121, or from any one of the anti-OX40 antibodies described in WO2017/077085 (including SAP9, SAP28.2, SAP15.3, SAP29-50, SAP25-29 and SAP29-23 and humanised versions described in Examples 4 and 5), WO2017/063162 (including O3, O19, O21 and the affinity matured version in Example 5—Table 2, including 21# H28H33, 21# H65, 21# H96, 21# VHnew-L80, 21# H96-L80), WO2017/050729 (including SP197), WO2017/021912 & WO2017/021910 (including ANTIBODY 106-222, OX86, and the antibodies described in FIGS. 6 and 7), WO2016/200836 & WO2016/200835 (including MOXR0916/1A7.gr1 IgG1), WO2016/196228 (including 3F4, 1466-1, 1466-2, 23H3, 18E9, 8B11, 20B3, 20C1, 6E1-1, 6E1-2, 14A2, 14A2-1, 14A2-2, L106, OX40.1, OX40.5, OX40.8, OX40.6, and OX40.16 and OX40.21—FIGS. 1 to 10), WO2016/179517 (including 11D4, pab1949, pab1949-1, pab2044, pab2193-1, Tables 1 to 4), WO2016/057667 (including 9612 and OX40mAb24), WO2015/153513 (including 3C8, 1D2, 1A7 and their variants described in the sequence listing, including A1A7.gr1 and 3C8.gr.5, the antibodies described in FIG. 1), WO2014/148895 (including ACT35, 12H3, 12H3 (FIG. 25)—and humanised versions VL1H1, VL1VH2, VL1VH3, VL2H1, VL2VH2 and VL2VH3 (FIGS. 43 & 44) and 20E5 (FIG. 24)), WO2013/068563 (including A26 [FIG. 2]), WO2013/038191 (including ACT35, 12H3 and 12H3), WO2013/028231 (including 119-122, 119-43-1, 106-222 and the antibodies in Table 1), WO2013/008171 (including 2F8, 1D4 and their derivatives, including VH6/VL9, and the antibodies in FIGS. 4 and 5 and tables 6 and 7), WO2012/027328 (including 119-122, 119-43-1, Hu106 and Hu106-222), WO2010/096418 (including A26), WO2008/106116 (including the antibodies in Tables 1 and 2, and A10 (inc A10A-F), B66—FIG. 14—B2, B24, B36, B37, and B39) and WO2007/062245 (including 112V8 (ATCC No. PTA-7219), 112Y55 (ATCC No. PTA-7220), 112Y131 (ATCC No. PTA-7218), 112F32 (ATCC No. PTA-7217) and 112Z5 (ATCC No. PTA-7216); the sequences and features of the anti-OX40 antibodies are incorporated herein by reference.

[0869] In one embodiment, the antigen-binding site specifically binds CXCR3, e.g. CXCR3. In one embodiment, the CXCR3 antigen-binding site comprises the CDRH1, CDRH2, CDRH3, CDRL1, CDRL2 and CDRL3, or the V_{H}, or the V_{L} or the V_{H} and V_{L} region from GSK3174998 or from any one of the anti-CXCR3 antibodies described in WO2016/200836, WO2016/200835, WO2016/196228, WO2016/179517, WO2016/057667, WO2015/153513, WO2014/148895, WO2013/068563, WO2013/038191, WO2013/028231, WO2013/008171, WO2012/027328, WO2010/096418, WO2011/073180, WO2008/106116 and WO2007/062245; the sequences and features of the anti-CXCR3 antibodies are incorporated herein by reference.

[0870] In one embodiment, the antigen-binding site specifically binds CD27, e.g. hCD27. In one embodiment, the CD27 antigen-binding site comprises the CDRH1, CDRH2, CDRH3, CDRL1, CDRL2 and CDRL3, or the V_{H}, or the V_{L} or the V_{H} and V_{L} region from any one of the anti-CD27 antibodies described in WO2016/145085 (including 1F5), WO2015/016718 (including hCD27.15 and 1F5), WO2014/140374 (including 2F2, 5F24, 5F32, 10F13, 10F31, 11F26, 1052 to 015, F2A4B2 and their derivatives, including hz5F24VH+V5Q, hz5F24VL+K45Q), WO2013/138586 (including C2177, C2186, C2191, and C2192 and the derivatives in Examples 8 to 12, and tables 7 to 42), WO2012/004367 (including hCD27.15/ATCC number PTA-11008), WO2011/130434 (including 1G5, 1H8, 3H12, 3H8, 2G9, 1F5, 3A10, 2C2, ms 1A4, ms 9F4 and ms M-T271), WO2011/081164 & WO2010/001908 (including KM4027, KM4028, KM4026, KM4030, KM4032 and derivatives thereof), WO2008/051424 (including LG3A10 and AT124-1); the sequences and features of the anti-CD27 antibodies are incorporated herein by reference.

[0871] In one embodiment, the antigen-binding site specifically binds CD3, e.g. hCD3. In one embodiment, the CD3 antigen-binding site comprises the CDRH1, CDRH2, CDRH3, CDRL1, CDRL2 and CDRL3, or the V_{H}, or the V_{L} or the V_{H} and V_{L} region from OKT3 antibody, otelixizumab, teplizumab or visilizumab, or from any one of the anti-CD3 antibodies described in WO2017/010874, WO2017/009442, WO2016/204966, WO2016/180721, WO2016/179003, WO2016/116626, WO2016/014974, WO2015/104346, WO2015/095392, WO2015/001085, WO2014/047231, WO2013/188693, WO2013/186613, WO2013/158856, WO2012/173819, WO2012/162067, WO2005/118635, WO2004/108158, WO2004/052397, WO2004/024771, WO01/51644, WO00/05268, WO97/44362, WO93/19196, WO92/06193 and WO91/09968; the sequences and features of the anti-CD3 antibodies are incorporated herein by reference.

Aspect 1b. An immunocytokine comprising an immunoglobulin heavy chain and an immunoglobulin light chain, wherein the heavy chain comprises in N- to C-terminal direction:
[0872] a) A V_{H} domain comprising CDRH1, CDRH2 and CDRH3; and
[0873] b) A heavy chain constant region;
[0874] c) Optionally, a linker, (L); and
[0875] d) An IL-2 cytokine;
[0876] and wherein the light chain comprises in N- to C-terminal direction:
[0877] e) A V_{L} domain comprising CDRL1, CDRL2 and CDRL3; and
[0878] f) A light chain constant region, (C_{L});
[0879] wherein the V_{H} domain and V_{L} domain are comprised by an antigen-binding site that specifically binds to an antigen selected from: an immune checkpoint inhibitor (such as PD-1, CTLA-4, TIGIT, TIM-3, LAG-3 and VISTA, e.g. TIGIT, TIM-3 and LAG-3), an immune modulator (such as BTLA, hHVEM, CSF1R, CCR4, CD39, CD40, CD73, CD96, CXCR2, CXCR4, CD200, GARP, SIRPα, CXCL9, CXCL10 and CD155, e.g. GARP, SIRPα, CXCR4, BTLA, hVEM and CSF1R), and an immune activator (such as CD137, GITR, OX40, CD40, CXCR3 (e.g. agonistic anti-CXCR3 antibodies), CD27, CD3 and ICOS (e.g. agonistic anti-ICOS antibodies), for example ICOS, CD137, GITR and OX40).

[0880] In another embodiment, the antigen-binding site that specifically binds to an antigen selected from: an immune checkpoint inhibitor (such as PD-1, CTLA-4, TIGIT, TIM-3, LAG-3 and VISTA, e.g. TIGIT, TIM-3 and LAG-3), an immune modulator (such as BTLA, hHVEM, CSF1R, CCR4, CD39, CD40, CD73, CD96, CXCR2, CXCR4, CD200, GARP, SIRPα, CXCL9, CXCL10 and CD155, e.g. GARP, SIRPα, CXCR4, BTLA, hVEM and CSF1R), and an immune activator (such as CD137, GITR, OX40, CD40, CXCR3 (e.g. agonistic anti-CXCR3 antibodies), CD3 and ICOS (e.g. agonistic anti-ICOS antibodies), for example ICOS, CD137, GITR and OX40).

[0881] Any of the embodiments of aspect 1 and/or aspect 1a apply mutatis mutandis to aspect 1b. Any of the features or embodiments of aspects 2 to 54 apply mutatis mutandis to aspect 1b. Any of the features of the antibodies or other embodiments or features of concepts 1 to 70 apply mutatis mutandis to aspect 1b.

[0882] In one embodiment, the antigen binding site specifically binds any of the antigens as set out in aspect 1a.

[0883] In one embodiment, the antigen-binding site specifically bind to hPD-L1 as defined by Seq ID No:1, and competes for binding to said hPD-L1 with the antibody 1D05; and wherein the immunocytokine comprises a V_{H} domain which comprises a CDRH3 comprising the motif X1GSGX2YGX3×4FD, wherein X₁, X₂ and X₃ are independently any amino acid, and X₄ is either present or absent, and if present, may be any amino acid.

[0884] In either of aspect 1 or 1a, the wording of part f) may be substituted to read: “f) a cytokine, e.g. selected from IL-7, IL-15, IL-21, IL-12, GM-CSF, TNFα, TGFβ, CXCL9, CXCL10 and interferon-α”. In 1b, the wording of part d) may be substituted for “d) a cytokine, e.g. selected from IL-7, IL-15, IL-21, IL-12, GM-CSF, TNFα, TGFβ, CXCL9, CXCL10 and interferon-α”. Thus, the immunocytokines as disclosed herein may contain cytokines other than a cytokine having IL-2 cytokine activity. In one embodiment, the cytokine is IL-7 (Seq ID No:330). In one embodiment, the cytokine is IL-15 (Seq ID No:331). In one embodiment, the cytokine is IL-21 (Seq ID No:332). In one embodiment, the cytokine is IL-12, comprising the α-chain (Seq ID No:336) and the β-chain (Seq ID No:337). In one embodiment, the cytokine is GM-CSF (Seq ID No:333). In one embodiment, the cytokine is TNFα (Seq ID No:335). In one embodiment, the cytokine is TGFβ. In one embodiment, the cytokine is CXCL9 (Seq ID No:338). In one embodiment, the cytokine is CXCL10 (Seq ID No:339). In one embodiment, the cytokine is interferon-α (Seq ID No:334).

[0885] In another embodiment, the cytokine is an immune-stimulating cytokine. In another embodiment, the cytokine is a T-cell stimulating cytokine.

Aspect 2. An immunocytokine according to aspect 1, wherein X₁ is a hydroxyl-containing amino acid, optionally T.
Aspect 3. An immunocytokine according to aspect 1 or aspect 2, wherein X₂ is a basic amino acid, optionally K.
Aspect 4. An immunocytokine according to any one of aspects 1 to 3, wherein X₂ is a hydroxyl-containing amino acid, optionally S or T.
Aspect 5. The immunocytokine according to any one of claims 1 to 4, wherein X₃ is an aromatic amino acid, optionally W.
Aspect 6. An immunocytokine according to any one of aspects 1 to 5, wherein X₄ is absent.
Aspect 7. An immunocytokine according to any one of aspects 1 to 5, wherein X₄ is present.
Aspect 8. An immunocytokine according to aspect 7, wherein X₄ is an aliphatic amino acid, optionally G.

[0886] The features of aspects 2 to 7 may be as defined in any of concepts 2 to 7 hereinabove.

Aspect 9. An immunocytokine comprising an immunoglobulin heavy chain and an immunoglobulin light chain, wherein the heavy chain comprises in N- to C-terminal direction:
[0887] a) A V_{H} domain comprising CDRH1, CDRH2 and CDRH3; and
[0888] b) A heavy chain constant region;
[0889] and wherein the light chain comprises in N- to C-terminal direction:
[0890] c) A V_{L} domain comprising CDRL1, CDRL2 and CDRL3;
[0891] d) A light chain constant region, (C_{L});
[0892] e) Optionally, a linker, (L); and
[0893] f) An IL-2 cytokine;
[0894] wherein the V_{H} domain and V_{L} domain are comprised by an antigen-binding site that specifically binds to hPD-L1, and competes for binding to said hPD-L1 with the antibody 1D05, wherein the antibody or fragment comprises a V_{H} domain which comprises the CDRH3 sequence of SEQ ID NO:29 or 32, or the CDRH3 sequence of SEQ ID NO:29 or 32 comprising 6 or fewer amino acid substitutions, optionally, wherein the immunocytokine is according to any one of aspects 2 to 8.

[0895] In this aspect, any of the features of CDRH3 described in concepts 9, and 9a to l, and any of the embodiments of concept 9 apply mutatis mutandis.

Aspect 10. An immunocytokine comprising an immunoglobulin heavy chain and an immunoglobulin light chain, wherein the heavy chain comprises in N- to C-terminal direction:
[0896] a) A V_{H} domain comprising CDRH1, CDRH2 and CDRH3; and
[0897] b) A heavy chain constant region;
[0898] and wherein the light chain comprises in N- to C-terminal direction:
[0899] c) A V_{L} domain comprising CDRL1, CDRL2 and CDRL3;
[0900] d) A light chain constant region, (C_{L});
[0901] e) Optionally, a linker, (L); and
[0902] f) An IL-2 cytokine;
[0903] wherein the V_{H} domain and V_{L} domain are comprised by an antigen-binding site that specifically binds to hPD-L1; and
[0904] wherein the V_{H} domain comprises a CDRH3 of from 12 to 20 amino acids and which is derived from the recombination of a human V_{H} gene segment, a human D gene segment and a human J_{H} gene segment, wherein the human J_{H} gene segment is IGHJ5 (e.g. IGHJ5*02).

[0905] In this aspect, any of the features of CDRH3 described in concepts 10 and 10a apply mutatis mutandis.

Aspect 11. An immunocytokine according to aspect 10, wherein the human V_{H} gene segment is IGHV3 (e.g. IGHV3-9, such as IGHV3-9*01).

[0906] In this aspect, any of the features of the gene segments described in concept 11, 11a or 11b apply mutatis mutandis.

Aspect 12. An immunocytokine according to aspect 10 or aspect 11, wherein the antibody or fragment comprises a V_{L} domain which is derived from the recombination of a human Vκ gene segment, and a human Jκ gene segment, wherein the human V_{L} gene segment is IGKV1D (e.g. IGKV1D-39, such as IGKV1D-39*01).

[0907] In this aspect, any of the features of the gene segments described in concept 12, 12a or 12b apply mutatis mutandis.

Aspect 13. An immunocytokine comprising an immunoglobulin heavy chain and an immunoglobulin light chain, wherein the heavy chain comprises in N- to C-terminal direction:
[0908] a) A V_{H} domain comprising CDRH1, CDRH2 and CDRH3; and
[0909] b) A heavy chain constant region;
[0910] and wherein the light chain comprises in N- to C-terminal direction:
[0911] c) A V_{L} domain comprising CDRL1, CDRL2 and CDRL3;
[0912] d) A light chain constant region, (C_{L});
[0913] e) Optionally, a linker, (L); and
[0914] f) An IL-2 cytokine;
[0915] wherein the V_{H} domain and V_{L} domain are comprised by an antigen-binding site that specifically binds to an epitope that is identical to an epitope to which the antibody 1D05 specifically binds.

[0916] In this aspect, any of the features of the epitopes, assays and other embodiments described in any of concepts 13 and 13a to 13l apply mutatis mutandis.

Aspect 14. An immunocytokine according to aspect 13, wherein the epitope is identified by an unrelated amino acid scan, or by X-ray crystallography.
Aspect 15. An immunocytokine according to aspect 14, wherein the contact residues of the epitope are defined by a reduction in affinity of at least 10-fold in an unrelated amino acid scan, e.g. an alanine scan as determined by SPR.

[0917] In this aspect, any of the features of concept 15 apply mutatis mutandis.

Aspect 16. An immunocytokine comprising an immunoglobulin heavy chain and an immunoglobulin light chain, wherein the heavy chain comprises in N- to C-terminal direction:
[0918] a) A V_{H} domain comprising CDRH1, CDRH2 and CDRH3; and
[0919] b) A heavy chain constant region;
[0920] and wherein the light chain comprises in N- to C-terminal direction:
[0921] c) A V_{L} domain comprising CDRL1, CDRL2 and CDRL3;
[0922] d) A light chain constant region, (C_{L});
[0923] e) Optionally, a linker, (L); and
[0924] f) An IL-2 cytokine;
[0925] wherein the V_{H} domain and V_{L} domain are comprised by an antigen-binding site which competes for binding to hPD-L1 with the antibody 1D05.

[0926] In this aspect, any of the features of the antibodies of concepts 16a to 16l or any of the competitive assays and other embodiments described in concept 16, or the features of concept 35 apply mutatis mutandis.

Aspect 17. An immunocytokine according to any one of aspects 10 to 16, wherein the V_{H} domain comprises the CDRH3 sequence of SEQ ID NO:29 or 32, or the CDRH3 sequence of SEQ ID NO:29 or 32 comprising 6 or fewer amino acid substitutions.

[0927] In this aspect, any of the features of the antibodies of concepts 17a to 17l apply mutatis mutandis.

Aspect 18. An immunocytokine according to any preceding aspect, wherein the V_{H} domain comprises the CDRH1 sequence of SEQ ID NO:27 or 30 or the CDRH1 sequence of SEQ ID NO:27 or 30 comprising 3, 2 or 1 amino acid substitution(s).

[0928] In this aspect, any of the features of the antibodies of concepts 18a to 18l apply mutatis mutandis.

Aspect 19. An immunocytokine according to any preceding aspect, wherein the V_{H} domain comprises the CDRH2 sequence of SEQ ID NO:28 or 31, or the CDRH2 sequence of SEQ ID NO:28 or 31 comprising 4 or fewer amino acid substitutions.

[0929] In this aspect, any of the features of the antibodies of concepts 19a to 19l apply mutatis mutandis.

Aspect 20. An immunocytokine according to any preceding aspect, wherein the V_{H} domain comprises an amino acid sequence of SEQ ID NO:33, or a heavy chain variable domain amino acid sequence that is at least 80% (e.g. at least 85%, or at least 90%) identical to SEQ ID NO:33 (for example the V_{H} domain sequence in any of the heavy chain sequences of Seq ID Nos:47 to 49).

[0930] In this aspect, any of the features of the antibodies of concepts 20a to 20l or any of the embodiments of concept 20 apply mutatis mutandis.

Aspect 21. An immunocytokine according to any preceding aspect comprising first and second copies of said heavy chain.
Aspect 22. An immunocytokine according to any preceding aspect, comprising a V_{L} domain which comprises the CDRL1 sequence of SEQ ID NO:37 or 40, or the CRDL1 sequence of SEQ ID NO:37 or 40 comprising 3 or fewer amino acid substitutions.

[0931] In this aspect, any of the features of the antibodies of concepts 22a to 22l apply mutatis mutandis.

Aspect 23. An immunocytokine according to any preceding aspect, comprising a V_{L} domain which comprises the CDRL2 sequence of SEQ ID NO:38 or 41, or the CRDL2 sequence of SEQ ID NO:38 or 41 comprising 2 or 1 amino acid substitution(s), for example a CDRL2 sequence of Seq ID No:50.

[0932] In this aspect, any of the features of the antibodies of concepts 23a to 231 apply mutatis mutandis.

Aspect 24. An immunocytokine according to any preceding aspect, comprising a V_{L} domain which comprises the CDRL3 sequence of SEQ ID NO:39 or 42, or the CRDL3 sequence of SEQ ID NO:39 or 42 comprising 4 or fewer amino acid substitutions.

[0933] In this aspect, any of the features of the antibodies of concepts 24a to 241 apply mutatis mutandis.

Aspect 25. An immunocytokine according to any preceding aspect, comprising a V_{L} domain which comprises an amino acid sequence of SEQ ID NO:43, or a light chain variable domain amino acid sequence that is at least 80% (e.g. at least 85%, or at least 90%) identical to SEQ ID NO:43 (for example the V_{L} domain sequence in the light chain sequence of Seq ID No:50 or 51).

[0934] In this aspect, any of the features of the antibodies of concepts 25a to 251 or any of the embodiments of concept 25 apply mutatis mutandis.

Aspect 26. An immunocytokine according to any preceding aspect comprising first and second copies of said light chain.
Aspect 27. An immunocytokine according to any preceding aspect which specifically binds to cynomolgus PD-L1 as defined by Seq ID No:2.

[0935] In this aspect, any of embodiments of concept 27 apply mutatis mutandis.

Aspect 28. An immunocytokine according to any preceding aspect, wherein the antibody or fragment comprises a kappa light chain.

[0936] In this aspect, any of the embodiments of concept 28 apply mutatis mutandis.

Aspect 29. An immunocytokine according to any one of aspects 9 to 28, wherein the amino acid substitutions are conservative amino acid substitutions, optionally wherein the conservative substitutions are from one of six groups (each group containing amino acids that are conservative substitutions for one another) selected from:
[0937] 1) Alanine (A), Serine (S), Threonine (T);
[0938] 2) Aspartic acid (D), Glutamic acid (E);
[0939] 3) Asparagine (N), Glutamine (Q);
[0940] 4) Arginine (R), Lysine (K);
[0941] 5) Isoleucine (I), Leucine (L), Methionine (M), Valine (V); and
[0942] 6) Phenylalanine (F), Tyrosine (Y), Tryptophan (W).

[0943] In this aspect, any of the embodiments of concept 9 apply mutatis mutandis.

Aspect 30. An immunocytokine according to any preceding aspect, wherein the antibody or fragment comprises a constant region, e.g. an IgG1 constant region, optionally wherein the constant region is a disabled IgG1 as defined in Seq ID No:205.

[0944] In this aspect, any of the features or the embodiments of concepts 30, 31 or 32 apply mutatis mutandis.

Aspect 31. An immunocytokine according to any preceding aspect wherein the:
[0945] A) V_{H} domain comprises an amino acid sequence of SEQ ID No:33 and the V_{L} domain comprises an amino acid sequence of SEQ ID No:43;
[0946] B) V_{H} domain comprises an amino acid sequence that is at least 85% identical to SEQ ID No:33, and the V_{L} domain comprises an amino acid sequence that is at least 85% identical to SEQ ID No:43;
[0947] C) V_{H} domain comprises an amino acid sequence of the V_{H} domain of SEQ ID No:47 and the V_{L} domain comprises an amino acid sequence of SEQ ID No:43;
[0948] D) V_{H} domain comprises an amino acid sequence of the V_{H} domain of SEQ ID No:48 and the V_{L} domain comprises an amino acid sequence of SEQ ID No:43;
[0949] E) V_{H} domain comprises an amino acid sequence of the V_{H} domain of SEQ ID No:49 and the V_{L} domain comprises an amino acid sequence of SEQ ID No:43;
[0950] F) V_{H} domain comprises an amino acid sequence of SEQ ID No:33 and the V_{L} domain comprises an amino acid sequence of the V_{L} domain of SEQ ID No:50;
[0951] G) V_{H} domain comprises an amino acid sequence of the V_{H} domain of SEQ ID No:47 and the V_{L} domain comprises an amino acid sequence of the V_{L} domain of SEQ ID No:50;
[0952] H) V_{H} domain comprises an amino acid sequence of the V_{H} domain of SEQ ID No:48 and the V_{L} domain comprises an amino acid sequence of the V_{L} domain of SEQ ID No:50;
[0953] I) V_{H} domain comprises an amino acid sequence of the V_{H} domain of SEQ ID No:49 and the V_{L} domain comprises an amino acid sequence of the V_{L} domain of SEQ ID No:50;
[0954] J) V_{H} domain comprises an amino acid sequence of SEQ ID No:33 and the V_{L} domain comprises an amino acid sequence of the V_{L} domain of SEQ ID No:51;
[0955] K) V_{H} domain comprises an amino acid sequence of the V_{H} domain of SEQ ID No:47 and the V_{L} domain comprises an amino acid sequence of the V_{L} domain of SEQ ID No:51;
[0956] L) V_{H} domain comprises an amino acid sequence of the V_{H} domain of SEQ ID No:48 and the V_{L} domain comprises an amino acid sequence of the V_{L} domain of SEQ ID No:51;
[0957] M) V_{H} domain comprise an amino acid sequence of the V_{H} domain of SEQ ID No:49 and the V_{L} domain comprises an amino acid sequence of the V_{L} domain of SEQ ID No:51;
[0958] N) V_{H} domain comprises an amino acid sequence of SEQ ID No:33 and the V_{L} domain comprises an amino acid sequence of the V_{L} domain of SEQ ID No:298;
[0959] O) V_{H} domain comprises an amino acid sequence of the V_{H} domain of SEQ ID No:47 and the V_{L} domain comprises an amino acid sequence of the V_{L} domain of SEQ ID No:298;
[0960] P) V_{H} domain comprises an amino acid sequence of the V_{H} domain of SEQ ID No:48 and the V_{L} domain comprises an amino acid sequence of the V_{L} domain of SEQ ID No:298;
[0961] Q) V_{H} domain comprise an amino acid sequence of the V_{H} domain of SEQ ID No:49 and the V_{L} domain comprises an amino acid sequence of the V_{L} domain of SEQ ID No:298;
[0962] R) V_{H} domain comprises an amino acid sequence of SEQ ID No:58 and the V_{L} domain comprises an amino acid sequence of SEQ ID No:68;
[0963] S) V_{H} domain comprises an amino acid sequence that is at least 85% identical to SEQ ID No:58, and the V_{L} domain comprise an amino acid sequence that is at least 85% identical to SEQ ID No:68;
[0964] T) V_{H} domain comprises an amino acid sequence of SEQ ID No:78 and the V_{L} domain comprises an amino acid sequence of SEQ ID No:88;
[0965] U) V_{H} domain comprises an amino acid sequence that is at least 85% identical to SEQ ID No:78, and the V_{L} domain comprises an amino acid sequence that is at least 85% identical to SEQ ID No:88;
[0966] V) V_{H} domain comprises an amino acid sequence of SEQ ID No:98 and the V_{L} domain comprises an amino acid sequence of SEQ ID No:108;
[0967] W) V_{H} domain comprises an amino acid sequence that is at least 85% identical to SEQ ID No:98, and the V_{L} domain comprises an amino acid sequence that is at least 85% identical to SEQ ID No:108;
[0968] X) V_{H} domain comprises an amino acid sequence of SEQ ID No:118 and the V_{L} domain comprises an amino acid sequence of SEQ ID No:128;
[0969] Y) V_{H} domain comprises an amino acid sequence that is at least 85% identical to SEQ ID No:118, and the V_{L} domain comprises an amino acid sequence that is at least 85% identical to SEQ ID No:128;
[0970] Z) V_{H} domain comprises an amino acid sequence of SEQ ID No:158 and the V_{L} domain comprises an amino acid sequence of SEQ ID No:168;
[0971] AA) V_{H} domain comprises an amino acid sequence that is at least 85% identical to SEQ ID No:158, and the V_{L} domain comprises an amino acid sequence that is at least 85% identical to SEQ ID No:168;
[0972] BB) V_{H} domain comprises an amino acid sequence of SEQ ID No:178 and the V_{L} domain comprises an amino acid sequence of SEQ ID No:188;
[0973] CC) V_{H} domain comprises an amino acid sequence that is at least 85% identical to SEQ ID No:178, and the V_{L} domain comprises an amino acid sequence that is at least 85% identical to SEQ ID No:188;
[0974] DD) V_{H} domain comprises an amino acid sequence of SEQ ID No:138 and the V_{L} domain comprises an amino acid sequence of SEQ ID No:148;
[0975] EE) V_{H} domain comprises an amino acid sequence that is at least 85% identical to SEQ ID No:13, and the V_{L} domain comprises an amino acid sequence that is at least 85% identical to SEQ ID No:148;
[0976] FF) V_{H} domain comprises an amino acid sequence of SEQ ID No:244 and the V_{L} domain comprises an amino acid sequence of SEQ ID No:254;
[0977] GG) V_{H} domain comprises an amino acid sequence that is at least 85% identical to SEQ ID No:244, and the V_{L} domain comprises an amino acid sequence that is at least 85% identical to SEQ ID No:254;
[0978] HH) V_{H} domain comprises an amino acid sequence of SEQ ID No:264 and the V_{L} domain comprises an amino acid sequence of SEQ ID No:274;
[0979] II) V_{H} domain comprises an amino acid sequence that is at least 85% identical to SEQ ID No:264, and the V_{L} domain comprises an amino acid sequence that is at least 85% identical to SEQ ID No:274;
[0980] JJ) V_{H} domain comprises an amino acid sequence of SEQ ID No:284 and the V_{L} domain comprises an amino acid sequence of SEQ ID No:294;
[0981] KK) V_{H} domain comprises an amino acid sequence that is at least 85% identical to SEQ ID No:284, and the V_{L} domain comprises an amino acid sequence that is at least 85% identical to SEQ ID No:294;
[0982] LL) V_{H} domain comprises an amino acid sequence of SEQ ID No:13 and the V_{L} domain comprises an amino acid sequence of SEQ ID No:23; and
[0983] MM) V_{H} domain comprises an amino acid sequence that is at least 85% identical to SEQ ID No:13, and the V_{L} domain comprises an amino acid sequence that is at least 85% identical to SEQ ID No:23;
[0984] NN) V_{H} domain comprises an amino acid sequence of SEQ ID No:349 and the V_{L} domain comprises an amino acid sequence of SEQ ID No:359; and
[0985] OO) V_{H} domain comprises an amino acid sequence that is at least 85% identical to SEQ ID No:349, and the V_{L} domain comprises an amino acid sequence that is at least 85% identical to SEQ ID No:359.

[0986] In one embodiment, the amino acid sequence is at least 70% identical to the specified Seq ID No. In one embodiment, the amino acid sequence is at least 75% identical to the specified Seq ID No. In one embodiment, the amino acid sequence is at least 95% identical to the specified Seq ID No. In one embodiment, the amino acid sequence is at least 96% identical to the specified Seq ID No. In one embodiment, the amino acid sequence is at least 97% identical to the specified Seq ID No. In one embodiment, the amino acid sequence is at least 98% identical to the specified Seq ID No. In one embodiment, the amino acid sequence is at least 99% identical to the specified Seq ID No. In one embodiment, the amino acid sequence is at least 99.5% identical to the specified Seq ID No.

Aspect 32. An immunocytokine according to any preceding aspect wherein the:
[0987] A) V_{H} and the constant region comprise an amino acid sequence of SEQ ID No:299 and V_{L} and C_{L} comprise an amino acid sequence of SEQ ID No:45;
[0988] B) V_{H} and the constant region comprise an amino acid sequence that is at least 85% identical to SEQ ID No:299, and the V_{L} and C_{L} comprise an amino acid sequence that is at least 85% identical to SEQ ID No:45;
[0989] C) V_{H} and the constant region comprise an amino acid sequence of SEQ ID No:47 and V_{L} and C_{L} comprise an amino acid sequence of SEQ ID No:45;
[0990] D) V_{H} and the constant region comprise an amino acid sequence of SEQ ID No:48 and V_{L} and C_{L} comprise an amino acid sequence of SEQ ID No:45;
[0991] E) V_{H} and the constant region comprise an amino acid sequence of SEQ ID No:49 and V_{L} and C_{L} comprise an amino acid sequence of SEQ ID No:45;
[0992] F) V_{H} and the constant region comprise an amino acid sequence of SEQ ID No:342 and V_{L} and C_{L} comprise an amino acid sequence of SEQ ID No:45;
[0993] G) V_{H} and the constant region comprise an amino acid sequence of SEQ ID No:238 and V_{L} and C_{L} comprise an amino acid sequence of SEQ ID No:50;
[0994] H) V_{H} and the constant region comprise an amino acid sequence of SEQ ID No:47 and V_{L} and C_{L} comprise an amino acid sequence of SEQ ID No:50;
[0995] I) V_{H} and the constant region comprise an amino acid sequence of SEQ ID No:48 and V_{L} and C_{L} comprise an amino acid sequence of SEQ ID No:50;
[0996] J) V_{H} and the constant region comprise an amino acid sequence of SEQ ID No:49 and V_{L} and C_{L} comprise an amino acid sequence of SEQ ID No:50;
[0997] K) V_{H} and the constant region comprise an amino acid sequence of SEQ ID No:342 and V_{L} and C_{L} comprise an amino acid sequence of SEQ ID No:50;
[0998] L) V_{H} and the constant region comprise an amino acid sequence of SEQ ID No:299 and V_{L} and C_{L} comprise an amino acid sequence of SEQ ID No:51;
[0999] M) V_{H} and the constant region comprise an amino acid sequence of SEQ ID No:47 and V_{L} and C_{L} comprise an amino acid sequence of SEQ ID No:51;
[1000] N) V_{H} and the constant region comprise an amino acid sequence of SEQ ID No:48 and V_{L} and C_{L} comprise an amino acid sequence of SEQ ID No:51;
[1001] O) V_{H} and the constant region comprise an amino acid sequence of SEQ ID No:49 and V_{L} and C_{L} comprise an amino acid sequence of SEQ ID No:51;
[1002] P) V_{H} and the constant region comprise an amino acid sequence of SEQ ID No:342 and V_{L} and C_{L} comprise an amino acid sequence of SEQ ID No:51;
[1003] Q) V_{H} and the constant region comprise an amino acid sequence of SEQ ID No:299 and V_{L} and C_{L} comprise an amino acid sequence of SEQ ID No:298;
[1004] R) V_{H} and the constant region comprise an amino acid sequence of SEQ ID No:47 and V_{L} and C_{L} comprise an amino acid sequence of SEQ ID No:298;
[1005] S) V_{H} and the constant region comprise an amino acid sequence of SEQ ID No:48 and V_{L} and C_{L} comprise an amino acid sequence of SEQ ID No:298;
[1006] T) V_{H} and the constant region comprise an amino acid sequence of SEQ ID No:49 and V_{L} and C_{L} comprise an amino acid sequence of SEQ ID No:298;
[1007] U) V_{H} and the constant region comprise an amino acid sequence of SEQ ID No:342 and V_{L} and C_{L} comprise an amino acid sequence of SEQ ID No:298;
[1008] V) V_{H} and the constant region comprise an amino acid sequence of SEQ ID No:60 and V_{L} and C_{L} comprise an amino acid sequence of SEQ ID No:70;
[1009] W) V_{H} and the constant region comprise an amino acid sequence that is at least 85% identical to SEQ ID No:60, and the V_{L} and C_{L} comprise an amino acid sequence that is at least 85% identical to SEQ ID No:70;
[1010] X) V_{H} and the constant region comprise an amino acid sequence of SEQ ID No:80 and V_{L} and C_{L} comprise an amino acid sequence of SEQ ID No:90;
[1011] Y) V_{H} and the constant region comprise an amino acid sequence that is at least 85% identical to SEQ ID No:80, and the V_{L} and C_{L} comprise an amino acid sequence that is at least 85% identical to SEQ ID No:90;
[1012] Z) V_{H} and the constant region comprise an amino acid sequence of SEQ ID No:100 and V_{L} and C_{L} comprise an amino acid sequence of SEQ ID No:110;
[1013] AA) V_{H} and the constant region comprise an amino acid sequence that is at least 85% identical to SEQ ID No:100, and the V_{L} and C_{L} comprise an amino acid sequence that is at least 85% identical to SEQ ID No:110;
[1014] BB) V_{H} and the constant region comprise an amino acid sequence of SEQ ID No:120 and V_{L} and C_{L} comprise an amino acid sequence of SEQ ID No:130;
[1015] CC) V_{H} and the constant region comprise an amino acid sequence that is at least 85% identical to SEQ ID No:120, and the V_{L} and C_{L} comprise an amino acid sequence that is at least 85% identical to SEQ ID No:130;
[1016] DD) V_{H} and the constant region comprise an amino acid sequence of SEQ ID No:160 and V_{L} and C_{L} comprise an amino acid sequence of SEQ ID No:170;
[1017] EE) V_{H} and the constant region comprise an amino acid sequence that is at least 85% identical to SEQ ID No:160, and the V_{L} and C_{L} comprise an amino acid sequence that is at least 85% identical to SEQ ID No:170;
[1018] FF) V_{H} and the constant region comprise an amino acid sequence of SEQ ID No:180 and V_{L} and C_{L} comprise an amino acid sequence of SEQ ID No:190;
[1019] GG) V_{H} and the constant region comprise an amino acid sequence that is at least 85% identical to SEQ ID No:180, and the V_{L} and C_{L} comprise an amino acid sequence that is at least 85% identical to SEQ ID No:190;
[1020] HH) V_{H} and the constant region comprise an amino acid sequence of SEQ ID No:140 and V_{L} and C_{L} comprise an amino acid sequence of SEQ ID No:150;
[1021] II) V_{H} and the constant region comprise an amino acid sequence that is at least 85% identical to SEQ ID No:140, and the V_{L} and C_{L} comprise an amino acid sequence that is at least 85% identical to SEQ ID No:150;
[1022] JJ) V_{H} and the constant region comprise an amino acid sequence of SEQ ID No:246 and V_{L} and C_{L} comprise an amino acid sequence of SEQ ID No:256;
[1023] KK) V_{H} and the constant region comprise an amino acid sequence that is at least 85% identical to SEQ ID No:246, and the V_{L} and C_{L} comprise an amino acid sequence that is at least 85% identical to SEQ ID No:256;
[1024] LL) V_{H} and the constant region comprise an amino acid sequence of SEQ ID No:266 and V_{L} and C_{L} comprise an amino acid sequence of SEQ ID No:276;
[1025] MM) V_{H} and the constant region comprise an amino acid sequence that is at least 85% identical to SEQ ID No:266, and the V_{L} and C_{L} comprise an amino acid sequence that is at least 85% identical to SEQ ID No:276;
[1026] NN) V_{H} and the constant region comprise an amino acid sequence of SEQ ID No:286 and V_{L} and C_{L} comprise an amino acid sequence of SEQ ID No:296; and
[1027] OO) V_{H} and the constant region comprise an amino acid sequence that is at least 85% identical to SEQ ID No:286, and the V_{L} and C_{L} comprise an amino acid sequence that is at least 85% identical to SEQ ID No:296;
[1028] PP) V_{H} and the constant region comprise an amino acid sequence of SEQ ID No:15 and V_{L} and C_{L} comprise an amino acid sequence of SEQ ID No:25; and
[1029] QQ) V_{H} and the constant region comprise an amino acid sequence that is at least 85% identical to SEQ ID No:15, and the V_{L} and C_{L} comprise an amino acid sequence that is at least 85% identical to SEQ ID No:25;
[1030] RR) V_{H} and the constant region comprise an amino acid sequence of SEQ ID No:351 and V_{L} and C_{L} comprise an amino acid sequence of SEQ ID No:361; and
[1031] SS) V_{H} and the constant region comprise an amino acid sequence that is at least 85% identical to SEQ ID No:351, and the V_{L} and C_{L} comprise an amino acid sequence that is at least 85% identical to SEQ ID No:361.

[1032] In one embodiment, the amino acid sequence is at least 70% identical to the specified Seq ID No. In one embodiment, the amino acid sequence is at least 75% identical to the specified Seq ID No. In one embodiment, the amino acid sequence is at least 95% identical to the specified Seq ID No. In one embodiment, the amino acid sequence is at least 96% identical to the specified Seq ID No. In one embodiment, the amino acid sequence is at least 97% identical to the specified Seq ID No. In one embodiment, the amino acid sequence is at least 98% identical to the specified Seq ID No. In one embodiment, the amino acid sequence is at least 99% identical to the specified Seq ID No. In one embodiment, the amino acid sequence is at least 99.5% identical to the specified Seq ID No.

Aspect 33. An immunocytokine according to any preceding aspect wherein the antigen-binding site specifically binds PD-L1, whilst the IL-2 cytokine binds the high affinity (αβγ) IL-2 receptor (IL-2R).

[1033] In one embodiment, the antigen binding site binds PD-L1 simultaneously to the IL-2 cytokine binding the αβγ IL-2R. In one embodiment, the antigen binding site binds PD-L1 sequentially to the IL-2 cytokine binding the αβγ IL-2R. In one embodiment, the IL-2 cytokine additionally binds the intermediate (βγ) IL-2R.

Aspect 34. An immunocytokine according to any preceding aspect wherein the immunocytokine is capable of inhibiting PD-L1-mediated suppression of T-cells.

[1034] In one embodiment, the immunocytokine inhibits PD-L1-mediated suppression of T-cells. In one embodiment, the immunocytokine inhibits PD-L1-mediated suppression of T-cells in an in vitro assay. In another embodiment, the antigen binding site has any of the features or embodiments of concept 51 or 52.

[1035] In another embodiment, the antigen binding site blocks or inhibits PD-1 binding to PD-L1. In one embodiment, the antigen binding site blocks or inhibits CD80 binding to PD-L1.

Aspect 35. An immunocytokine according to any preceding aspect wherein the immunocytokine is capable of increasing IL-2R-mediated T-cell activation.

[1036] In one embodiment, the immunocytokine increases IL-2R-mediated T-cell activation. In one embodiment, the immunocytokine increases IL-2R-mediated T-cell activation in an in vitro assay.

Aspect 36. An immunocytokine according to aspect 34 or aspect 35, wherein the suppression of T-cells or the increase in IL-2R-mediated T-cell activation is measured by an increase in one or more of IFNγ, IL-2, CD25 or proliferation of T-cells in an assay that provides co-stimulation by either direct CD3/CD28 stimulation, superantigen stimulation or provides co-stimulation by co-incubation with cells capable of inducing a T-cell response.

[1037] The measurements may be carried out with any suitable technique. For example, the measurements may be taken with ELISA, HTRF, BRDU incorporation (proliferation), electrochemiluminescence (ECL) or flow cytometry (e.g. FACS). These techniques are well-known to those skilled in the art and are described elsewhere herein. In one embodiment, the assay is flow cytometry. In one embodiment, the assay is ELISA. In one embodiment, the assay is HTRF.

[1038] In this aspect, when aspect 36 is dependent on aspect 34, any of the features or embodiments of concept 36 apply mutatis mutandis.

[1039] When Aspect 36 is dependent on Aspect 35, in one embodiment, the increase in IL-2R-mediated T-cell activation is measured by an increase in one or both of IFNγ and CD25.

[1040] When Aspect 36 is dependent on Aspect 35, in one embodiment, the co-stimulation is provided by direct CD3/CD28 stimulation.

[1041] When Aspect 36 is dependent on Aspect 35, in one embodiment, the co-stimulation is provided by a superantigen, such as staphylococcal enterotoxin B (SEB).

[1042] When Aspect 36 is dependent on Aspect 35, in one embodiment, the assay provides co-stimulation by co-incubation with cells capable of inducing a T-cell response. Such cells may be antigen-presenting cells (APCs), for example monocytes, B-cells or dendritic cells. In one embodiment, the assay provides co-stimulation by co-incubation with APCs. In one embodiment, the assay provides co-stimulation by co-incubation with monocytes. In one embodiment, the assay provides co-stimulation by co-incubation with B-cells. In one embodiment, the assay provides co-stimulation by co-incubation with dendritic cells.

Aspect 37. An immunocytokine according to any preceding aspect which does not comprise a linker (L), or an immunocytokine according to any preceding claim wherein the C_{L} of d) is directly fused to the cytokine of f).

[1043] In one embodiment, the C_{L} of the light chain or the heavy chain is directly fused to the cytokine.

[1044] In one embodiment of aspect 1b, the C_{L} of b) is directly fused to the cytokine of d).

Aspect 38. An immunocytokine according to any one of aspects 1 to 37, wherein the linker is a peptide linker of 1 to 20 amino acids in length.

[1045] In one embodiment, the linker is peptide linker of 1 to 15 amino acids in length. In one embodiment, the linker is peptide linker of 1 to 10 amino acids in length. In one embodiment, the linker is peptide linker of 1 to 5 amino acids in length.

[1046] In one embodiment, the linker may be a chemical linker. In the case of recombinant fusion proteins, the linkers are encoded by nucleic acid sequences located in frame, in between the coding regions for the different immunocytokine portions. In the case of synthetic proteins, the linker peptides are introduced during synthesis.

[1047] Linkers are well-known to those skilled in the art. For example, see described in Denardo et al., 1998, Clin. Cancer Res., 4(10):2483-90; Peterson et al., 1999, Bioconjug. Chem. 10(4):553-7; and Zimmerman et al., 1999, Nucl. Med. Biol., 26(8):943-50, the modifications described therein are incorporated herein by reference.

Aspect 39. An immunocytokine according to aspect 38, wherein the linker peptide is selected from poly-G or (G₄S)_{X}, wherein X is 1, 2, 3 or 4.

[1048] In other embodiments, the linker may be selected from STG, GSTG, RS, TVAAPS, GGGGS, GSTVAAPS, TVAAPSGS or GSTVAAPSGS. In another embodiment, the linker is Gln-Arg-Val-Asp (derived from N-terminus of canine kappa constant region). In another embodiment, the linker is GGNGT or YGNGT.

Aspect 40. An immunocytokine according to any preceding aspect wherein the IL-2 cytokine is human IL-2 (hIL-2) or a variant thereof.

[1049] IL-2 variants are as described in aspect 1.

[1050] There is also provided a variant cytokine, which may be any of the non-IL-2 cytokines described herein (including the non-IL-2 cytokines described in aspect 1, e.g. selected from IL-7, IL-15, IL-21, IL-12, GM-CSF, TNFα, CXCL9, CXCL10 and interferon-α). The definition of a variant IL-2 cytokine applies mutatis mutandis to the other cytokines (including immune stimulating cytokines and T-cell stimulating cytokines) described herein, e.g. comprising any of the N-terminal deletions described for IL-2 in aspect 1.

Aspect 41. An immunocytokine according to aspect 40, wherein the hIL-2 comprises or consists of the amino acid sequence of Seq ID No:301.
Aspect 42. An immunocytokine according to aspect 40, wherein the hIL-2 comprises a variant of IL-2 which comprises a modification at the N-terminus, optionally a deletion of from 1 to 10 amino acids.

[1051] As used in this aspect, a modification at the N-terminus of any of the cytokines described herein (including the non-IL-2 cytokines described in aspect 1, e.g. selected from IL-7, IL-15, IL-21, IL-12, GM-CSF, TNFα, CXCL9, CXCL10 and interferon-α) refers to one or more (such as 1 to 10, e.g. 1 to 5) amino acid substitutions, deletions or additions.

[1052] In one embodiment, the modification is one or more (such as 1 to 10, e.g. 1 to 5) amino acid substitutions at the N-terminus of the cytokine. Substitutions may be conservative substitutions, for example, as defined in concept 9, concept 29 or aspect 29. In one embodiment, the modification is a deletion. In another embodiment, the modification is an N-terminal deletion, for example, any of the deletions described in concept 9 and aspect 1. In one embodiment, the modification (such as a deletion of 1 to 10 amino acids) is within the final 50 amino acids of the N-terminus of the cytokine, e.g. the IL-2 cytokine. In one embodiment, the modification (such as a deletion of 1 to 10 amino acids) within the final 30 amino acids of the N-terminus of the cytokine, e.g. the IL-2 cytokine. In one embodiment, the modification (such as a deletion of 1 to 10 amino acids) within the final 25 amino acids of the N-terminus of the cytokine, e.g. the IL-2 cytokine. In one embodiment, the modification (such as a deletion of 1 to 10 amino acids) within the final 20 amino acids of the N-terminus of the cytokine, e.g. the IL-2 cytokine. In one embodiment, the modification (such as a deletion of 1 to 10 amino acids) within the final 15 amino acids of the N-terminus of the cytokine, e.g. the IL-2 cytokine. In one embodiment, the modification (such as a deletion of 1 to 10 amino acids) within the final 10 amino acids of the N-terminus of the cytokine, e.g. the IL-2 cytokine.

[1053] In one embodiment, the modification is a deletion of 1 to 9 amino acids from within the final 10 amino acids of the N-terminus of the cytokine, such as a deletion of the final 1 to 9 amino acids of the N-terminus of the cytokine. In one embodiment, the modification is a deletion of 1 to 8 amino acids from within the final 10 amino acids of the N-terminus of the cytokine, such as a deletion of the final 1 to 8 amino acids of the N-terminus of the cytokine. In one embodiment, the modification is a deletion of 1 to 7 amino acids from within the final 10 amino acids of the N-terminus of the cytokine, such as a deletion of the final 1 to 7 amino acids of the N-terminus of the cytokine. In one embodiment, the modification is a deletion of 1 to 6 amino acids from within the final 10 amino acids of the N-terminus of the cytokine, such as a deletion of the final 1 to 6 amino acids of the N-terminus of the cytokine. In one embodiment, the modification is a deletion of 1 to 5 amino acids from within the final 10 amino acids of the N-terminus of the cytokine, such as a deletion of the final 1 to 5 amino acids of the N-terminus of the cytokine. In one embodiment, the modification is a deletion of 1 to 4 amino acids from within the final 10 amino acids of the N-terminus of the cytokine, such as a deletion of the final 1 to 4 amino acids of the N-terminus of the cytokine. In one embodiment, the modification is a deletion of 1 to 3 amino acids from within the final 10 amino acids of the N-terminus of the cytokine, such as a deletion of the final 1 to 3 amino acids of the N-terminus of the cytokine. In one embodiment, the modification is a deletion of 1 or 2 amino acids from within the final 10 amino acids of the N-terminus of the cytokine, such as a deletion of the final 1 or 2 amino acids of the N-terminus of the cytokine. In one embodiment, the modification is a deletion of 1 amino acid from within the final 10 amino acids of the N-terminus of the cytokine, such as a deletion of the final amino acid of the N-terminus of the cytokine. In a particular embodiment, the cytokine is an IL-2 cytokine, such as a human IL-2 cytokine.

[1054] In one embodiment, the deletion is of the 9th amino acid from the N-terminus of the cytokine, e.g. the IL-2 cytokine, for example the human IL-2 cytokine. In one embodiment, the deletion is of the 8th and 9th amino acid from the N-terminus of the cytokine, e.g. the IL-2 cytokine, for example the human IL-2 cytokine. In one embodiment, the deletion is of the 7^{th}, 8^{th} and 9^{th} amino acid from the N-terminus of the cytokine, e.g. the IL-2 cytokine, for example the human IL-2 cytokine. In one embodiment, the deletion is of the 6th to 9th amino acid from the N-terminus of the cytokine, e.g. the IL-2 cytokine, for example the human IL-2 cytokine. In one embodiment, the deletion is of the 4th to 9th amino acid from the N-terminus of the cytokine, e.g. the IL-2 cytokine, for example the human IL-2 cytokine. In one embodiment, the deletion is of the 3^{rd} to 9^{th} amino acid from the N-terminus of the cytokine, e.g. the IL-2 cytokine, for example the human IL-2 cytokine. In one embodiment, the deletion is of the 2^{nd} to 9^{th} amino acid from the N-terminus of the cytokine, e.g. the IL-2 cytokine, for example the human IL-2 cytokine. In one embodiment, the deletion is of the 2^{nd} to 6^{th} amino acid from the N-terminus of the cytokine, e.g. the IL-2 cytokine, for example the human IL-2 cytokine. In one embodiment, the deletion is of the 3^{rd} to 7^{th} amino acid from the N-terminus of the cytokine, e.g. the IL-2 cytokine, for example the human IL-2 cytokine. In one embodiment, the deletion is of the 4th to 8^{th} amino acid from the N-terminus of the cytokine, e.g. the IL-2 cytokine, for example the human IL-2 cytokine. Any of the deletions described in Aspect 1 hereinabove may be applied mutatis mutandis to the non-IL-2 cytokines of this aspect.

[1055] Aspect 42a. A variant hIL-2 comprising an N-terminal modification of any of the aspects or features of aspect 42. In one embodiment of aspect 42a, the variant hIL-2 is a purified variant hIL-2. In another embodiment of aspect 42a, the variant hIL-2 is an isolated and purified variant hIL-2.

[1056] Aspect 42b. A variant cytokine selected from IL-7, IL-15, IL-21, IL-12, GM-CSF, TNFα, CXCL9, CXCL10 and interferon-α comprising an N-terminal modification of any of the aspects or features of aspect 42. In one embodiment of aspect 42a, the variant cytokine is a purified variant cytokine. In another embodiment of aspect 42a, the variant cytokine is an isolated and purified variant cytokine.

Aspect 43. An immunocytokine according to aspect 40 or aspect 42, wherein the hIL-2 comprises a variant IL-2 comprising an N-terminal sequence selected from Seq ID No:303 to 323.

[1057] Aspect 43a. A variant hIL-2 comprising an N-terminal sequence selected from Seq ID No:303 to 323.

[1058] In one embodiment of aspect 43a, the variant hIL-2 is a purified variant hIL-2. In another embodiment of aspect 43a, the variant hIL-2 is an isolated and purified variant hIL-2. In one embodiment, the variant hIL-2 comprises (or consists) of an N-term terminal sequence selected from Seq ID No:303 to 323 directly fused to an IL-2 sequence selected from Seq ID No:324, 517 and 518.

Aspect 44. An immunocytokine according to any one of aspects 40, 42 or 43 wherein the hIL-2 variant comprises one or more (such as 1 to 5, e.g. one or two) mutations independently selected from the following:
[1059] 1) D20 (such as D20T);
[1060] 2) R38 (such as R38W, R38A or R38Q);
[1061] 3) F42 (such as F42A or F42K);
[1062] 4) Y45 (such as Y45A);
[1063] 5) E62 (such as E62A);
[1064] 6) N88 (such as N88R);
[1065] 7) C125 (such as C125S);
[1066] 8) Q126 (such as Q126W); or
[1067] 9) R38 and F42 (such as R38W and F42K or R38A and F42A);
[1068] wherein the residue numbering is defined with reference to the human wild-type IL-2 sequence, Seq ID No:301.
   Aspect 44a. A variant hIL-2 according to any one of aspects 42a or 43a wherein the hIL-2 variant comprises one or more (such as 1 to 5, e.g. one or two) mutations independently selected from the following:
[1069] 1) D20 (such as D20T);
[1070] 2) R38 (such as R38W, R38A or R38Q);
[1071] 3) F42 (such as F42A or F42K);
[1072] 4) Y45 (such as Y45A);
[1073] 5) E62 (such as E62A);
[1074] 6) N88 (such as N88R);
[1075] 7) C125 (such as C125S);
[1076] 8) Q126 (such as Q126W); or
[1077] 9) R38 and F42 (such as R38W and F42K or R38A and F42A);
   wherein the residue numbering is defined with reference to the human wild-type IL-2 sequence, Seq ID No:301.

[1078] In one embodiment, the variant hIL-2 comprises (or consists) of an R38 (such as R38W, R38A or R38Q, e.g. R38A) mutation. In one embodiment, the variant hIL-2 comprises (or consists) of an F42 (such as F42A or F42K, e.g. F42A) mutation. In one embodiment, the variant hIL-2 comprises (or consists) of a Y45 (such as Y45A) mutation. In one embodiment, the variant hIL-2 comprises (or consists) of an E62 (such as E62A) mutation.

[1079] In one embodiment, the variant hIL-2 comprises (or consists) of an R38 (such as R38W, R38A or R38Q, e.g. R38A) mutation and an F42 (such as F42A or F42K, e.g. F42A) mutation. In one embodiment, the variant hIL-2 comprises (or consists) of an R38 (such as R38W, R38A or R38Q, e.g. R38A) and a Y45 (such as Y45A) mutation. In one embodiment, the variant hIL-2 comprises (or consists) of an R38 (such as R38W, R38A or R38Q, e.g. R38A) mutation and an E62 (such as E62A). In one embodiment, the variant hIL-2 comprises (or consists) of a Y45 (such as Y45A) mutation and an E62 (such as E62A). In one embodiment, the variant hIL-2 comprises (or consists) of an F42 (such as F42A or F42K, e.g. F42A) mutation and an E62 (such as E62A) mutation. In one embodiment, the variant hIL-2 comprises (or consists) of an F42 (such as F42A or F42K, e.g. F42A) mutation and a Y45 (such as Y45A) mutation.

[1080] In one embodiment, the variant hIL-2 comprises (or consists) of an R38 (such as R38W, R38A or R38Q, e.g. R38A) mutation, an F42 (such as F42A or F42K, e.g. F42A) mutation and a Y45 (such as Y45A) mutation. In one embodiment, the variant hIL-2 comprises (or consists) of an R38 (such as R38W, R38A or R38Q, e.g. R38A) mutation, an F42 (such as F42A or F42K, e.g. F42A) mutation and an E62 (such as E62A) mutation. In one embodiment, the variant hIL-2 comprises (or consists) of an R38 (such as R38W, R38A or R38Q, e.g. R38A) mutation, a Y45 (such as Y45A) mutation and an E62 (such as E62A) mutation.

[1081] In one embodiment, the variant hIL-2 comprises (or consists) of an R38 (such as R38W, R38A or R38Q, e.g. R38A) mutation, an F42 (such as F42A or F42K, e.g. F42A) mutation, a Y45 (such as Y45A) mutation and an E62 (such as E62A) mutation. In one embodiment, the variant hIL-2 comprises (or consists) of an R38A, F42A, Y45A and an E62A mutation.

[1082] Other hIL-2 mutations are known to those skilled in the art. In one embodiment, the hIL-2 mutations are those described in WO2012/062228 (see claims 2 to 7, incorporated herein by reference). In one embodiment, the hIL-2 mutations are those described in WO1999/60128 (see claims 6, 7, 8, 10, 11 and 12 incorporated herein by reference). In one embodiment, the hIL-2 mutations are those described in WO1993/20849 (see claims 4 and 5 incorporated herein by reference). In one embodiment, the hIL-2 mutations are those described in WO2003/015697 (see claims 7 and 10 incorporated herein by reference). In one embodiment, the hIL-2 mutations are those described in WO2005/007121 (see claims 9 to 14 incorporated herein by reference). In one embodiment, the hIL-2 mutations are those described in WO2005/086798 (see claims 5 to 10 incorporated herein by reference). In one embodiment, the hIL-2 mutations are those described in WO2005/086751 (see claims 5 to 9 incorporated herein by reference). In one embodiment, the hIL-2 mutations are those described in WO2009/061853 (see claim 5 incorporated herein by reference). In one embodiment, the hIL-2 mutations are those described in WO2012/088446 (see claims 3 to 8 and 11 to 13 incorporated herein by reference). In one embodiment, the hIL-2 mutations are those described in WO2012/107417 (see claims 2, 4, 6 and 9, incorporated herein by reference). In one embodiment, the hIL-2 mutations are those described in WO2012/119093 (see claims 1 to 7, incorporated herein by reference). In one embodiment, the hIL-2 mutations are those described in WO2015/164815 (see claims 3 to 19, incorporated herein by reference).

[1083] In these aspects, where the residue numbering is defined with reference to the human wild-type IL-2 sequence, if, for example, there is a single amino acid deletion from the N-terminus of the cytokine, and the claim described an N88 amino acid mutation, then, for the variant IL-2 having the single amino acid deletion, the N will in fact be at position 87. If the cytokine has 3 amino acids deleted from the N-terminus, and the mutation is an F42A mutation, then the position to be mutated, will in fact be F39 in the variant sequence.

Aspect 45. An immunocytokine according to aspect 40, wherein the hIL-2 comprises a variant IL-2 consists of an N-terminal sequence selected from Seq ID No:242 to 262 fused to the amino acid sequence of Seq ID No:324.

[1084] In one embodiment, the variant hIL-2 comprises (or consists) of an N-terminal sequence selected from Seq ID No:303 to 323 fused to the amino acid sequence selected from Seq ID No:324, 517 and 518.

[1085] In one embodiment, the immunocytokine is 1D05 D1-9 ICK. In one embodiment, the immunocytokine is 1D05 D1-9. In one embodiment, the immunocytokine is 1D05 D9-2 ICK. In one embodiment, the immunocytokine is 1D05 D9-7 ICK.

[1086] Aspect 45a. A variant hIL-2 comprising an N-terminal sequence selected from Seq ID No:303 to 323 fused to the amino acids sequence of Seq ID No:324.

[1087] In one embodiment of aspect 45a, the variant hIL-2 is a purified variant hIL-2. In another embodiment of aspect 44a, the variant hIL-2 is an isolated and purified variant hIL-2.

Aspect 46. An immunocytokine according to any preceding aspect, wherein the IL-2 cytokine binds to the high affinity (αβγ) IL-2 receptor with a potency less than free IL-2, for example with an EC₅₀ of greater than 20 μM, greater than 50 μM or greater than 100 μM, e.g. when measured in a cell-based proliferative assay.

[1088] Free IL-2 has a potency of approximately 10 μM against the αβγ (high affinity) receptor in a cell-based proliferative assay. As used herein, EC₅₀ refers to the effective concentration to give 50% of maximal activation of the IL2R. The higher the EC₅₀, the less potent the substance is, thus a substance having an EC₅₀ of 1 μM is more potent than a substance with an EC₅₀ of 1 nM. The sequences of the α-chain, β-chain and γ-chain are provided in Seq ID Nos:327, 328 and 329 respectively.

[1089] In one embodiment, the IL-2 cytokine has an EC₅₀ in the range of 5 pM to 20 pM. In one embodiment, the EC₅₀ is in the range of 5 pM to 1 nM. In one embodiment, the EC₅₀ is in the range of 5 pM to 750 pM, 5 pM to 500 pM, 5 pM to 250 pM or 5 pm to 100 pM, e.g. 5 pM to 50 pM.

[1090] In one embodiment, the EC₅₀ is in the range of 10 pM to 1 nM. In one embodiment, the EC₅₀ is in the range of 10 pM to 750 pM, 10 pM to 500 pM, 10 pM to 250 pM or 10 pm to 100 pM, e.g. 10 pM to 50 pM, or 10 pM to 30 pM.

[1091] In one embodiment, the EC₅₀ is in the range of 20 pM to 1 nM. In one embodiment, the EC₅₀ is in the range of 20 pM to 750 pM, 20 pM to 500 pM, 20 pM to 250 pM or 20 pm to 100 pM, e.g. 20 pM to 50 pM.

[1092] In another embodiment, the IL-2 cytokine has an EC₅₀ in the range of 50 pM to 1 nM. In one embodiment, the EC₅₀ is in the range of 50 pM to 750 pM, 50 pM to 500 pM, 50 pM to 250 pM or 50 pm to 100 pM, e.g. 50 pM to 75 pM. In another embodiment, the IL-2 cytokine has an EC₅₀ in the range of 100 pM to 1 nM. In one embodiment, the EC₅₀ is in the range of 100 pM to 800 pM, 100 pM to 700 pM, 100 pM to 600 pM or 100 pm to 500 pM, e.g. 100 pM to 400 pM. In another embodiment, the IL-2 cytokine has an EC₅₀ in the range of 100 pm to 300 pM. In another embodiment, the IL-2 cytokine has an EC₅₀ in the range of 100 pm to 200 pM.

[1093] In another embodiment, the EC₅₀ is greater than 5 pM. In another embodiment, the EC₅₀ is greater than 10 μM. In another embodiment, the EC₅₀ is greater than 20 μM. In another embodiment, the EC₅₀ is greater than 30 pM, greater than 40 pM, greater than 50 pM, greater than 60 pM or greater than 70 pM. In another embodiment, the EC₅₀ is greater than 100 pM, greater than 125 pM, greater than 150 pM, greater than 175 pM or greater than 200 pM. In another embodiment, the EC₅₀ is greater than 250 pM, greater than 300 pM, greater than 350 pM, greater than 400 pM. In another embodiment, the EC₅₀ is greater than 500 pM, greater than 600 pM, greater than 700 pM or greater than 800 pM.

[1094] In one embodiment, the EC₅₀ is less than 5 nM. In one embodiment, the EC₅₀ is less than 1 nM. In one embodiment, the EC₅₀ is less than 800 pM. In one embodiment, the EC₅₀ is less than 700 pM. In one embodiment, the EC₅₀ is less than 600 pM. In one embodiment, the EC₅₀ is less than 500 pM. In one embodiment, the EC₅₀ is less than 400 pM. In one embodiment, the EC₅₀ is less than 300 pM. In one embodiment, the EC₅₀ is less than 200 pM. In one embodiment, the EC₅₀ is less than 100 pM. In one embodiment, the EC₅₀ is less than 50 pM.

[1095] The potency of the immunocytokine against the αβγ IL-2R may be measured in a cell-based proliferative assay, which are well-known to those skilled in the art and are detailed more in the Examples hereinbelow (see Example 13 and FIG. 12).

Aspect 47. An immunocytokine according to any preceding aspect, wherein the IL-2 binds to the intermediate affinity (βγ) IL-2 receptor with a potency less than free IL-2, for example with an EC₅₀ of greater than 1 nM, greater than 5 nM or greater than 10 nM, e.g. when measured in a cell-based proliferative assay.

[1096] Free IL-2 has a potency of approximately 100 pM against the βγ (intermediate affinity) receptor in a cell-based proliferative assay. As used herein, EC₅₀ refers to the effective concentration to give 50% of maximal activation of the IL-2R. The higher the EC₅₀, the less potent the substance is, thus a substance having an EC₅₀ of 1 μM is more potent than a substance with an EC₅₀ of 1 nM. The sequences of the α-chain, β-chain and γ-chain are provided in Seq ID Nos:327, 328 and 329 respectively.

[1097] In one embodiment, the EC₅₀ is in the range of 1 to 100 nM. In one embodiment, the EC₅₀ is in the range of 10 nM to 100 nM. In one embodiment, the EC₅₀ is in the range of 20 nM to 100 nM. In another embodiment, the IL-2 cytokine has an EC₅₀ in the range of 30 nM to 100 nM, 40 nM to 100 nM, 50 nM to 100 nM. In one embodiment, the EC₅₀ is in the range of 50 nM to 100 nM, 60 nM to 100 nM, 70 nM to 100 nM.

[1098] In one embodiment, the EC₅₀ is in the range of 1 to 50 nM. In one embodiment, the EC₅₀ is in the range of 10 nM to 50 nM. In one embodiment, the EC₅₀ is in the range of 20 nM to 50 nM. In another embodiment, the IL-2 cytokine has an EC₅₀ in the range of 30 nM to 50 nM or 40 nM to 50 nM.

[1099] In one embodiment, the EC₅₀ is in the range of 1 to 10 nM. In one embodiment, the EC₅₀ is in the range of 1 to 20 nM. In one embodiment, the EC₅₀ is in the range of 1 to 30 nM. In one embodiment, the EC₅₀ is in the range of 1 nM to 9 nM. In one embodiment, the EC₅₀ is in the range of 1 nM to 8 nM. In another embodiment, the IL-2 cytokine has an EC₅₀ in the range of 1 nM to 7 nM, 1 nM to 6 nM or 1 nM to 5 nM.

[1100] In another embodiment, the EC₅₀ is greater than 0.5 nM, greater than 0.6 nM, greater than 0.7 nM, greater than 0.8 nM or greater than 0.9 nM. In another embodiment, the EC₅₀ is greater than 1 nM, greater than 1.25 nM, greater than 1.5 nM, greater than 1.75 nM or greater than 2 nM. In another embodiment, the EC₅₀ is greater than 2.5 nM, greater than 3 nM, greater than 3.5 nM, greater than 4 nM. In another embodiment, the EC₅₀ is greater than 5 nM, greater than 6 nM, greater than 7 nM or greater than 8 nM. In a particular embodiment, the EC₅₀ is greater than 1 nM.

[1101] In one embodiment, the EC₅₀ is less than 10 nM. In one embodiment, the EC₅₀ is less than 20 nM. In one embodiment, the EC₅₀ is less than 30 nM. In one embodiment, the EC₅₀ is less than 40 nM. In one embodiment, the EC₅₀ is less than 50 nM.

[1102] In one embodiment, the EC₅₀ is less than 100 nM. In one embodiment, the EC₅₀ is less than 200 nM. In one embodiment, the EC₅₀ is less than 300 nM.

[1103] In another embodiment, the EC₅₀ is less than 75 nM or less than 50 nM.

[1104] In one embodiment, the IL-2 shows no detectable potency against the βγ IL-2R in a cell-based proliferative assay.

[1105] The potency of the immunocytokine against the βγ IL-2R may be measured in a cell-based proliferative assay, which are well-known to those skilled in the art and are detailed more in the Examples hereinbelow (see Example 13 and FIG. 12).

Aspect 48. An immunocytokine according to any preceding aspect, wherein the IL-2 preferentially binds to the high affinity (αβγ) IL-2 receptor over the intermediate affinity (βγ) IL-2 receptor.
Aspect 49. An immunocytokine according to aspect 48, wherein the ratio of IL-2 potency against the high affinity (αβγ) IL-2 receptor:intermediate affinity (βγ) IL-2 receptor is at least 2:1.

[1106] In one embodiment, the ratio is at least 3:1. In one embodiment, the ratio is at least 4:1. In one embodiment, the ratio is at least 5:1. In one embodiment, the ratio is at least 7.5:1. In one embodiment, the ratio is at least 10:1. In one embodiment, the ratio is at least 12.5:1. In one embodiment, the ratio is at least 15:1. In one embodiment, the ratio is at least 17.5:1. In one embodiment, the ratio is at least 20:1.

[1107] In another embodiment, the ratio is at least 50:1. In another embodiment, the ratio is at least 75:1. In another embodiment, the ratio is at least 100:1. In another embodiment, the ratio is at least 250:1. In another embodiment, the ratio is at least 500:1. In another embodiment, the ratio is at least 750:1. In another embodiment, the ratio is at least 1000:1.

[1108] In another embodiment, the ratio is at least 1250:1. In another embodiment, the ratio is at least 1500:1. In another embodiment, the ratio is at least 1750:1. In another embodiment, the ratio is at least 2000:1.

Aspect 50. An immunocytokine according to any preceding aspect, wherein the antigen binding site binds to hPD-L1 with an affinity of less than 500 pM (e.g. less than 300 pM or less than 200 pM), optionally wherein the immunocytokine provides a ratio of the potency of the IL-2 cytokine against the high affinity (αβγ) receptor: affinity of the anti-PD-L1 antigen binding site against hPD-L1 of at least 2:1.

[1109] In one embodiment, the antigen binding site binds to hPD-L1 with an affinity of less than 200 pM. In one embodiment, the antigen binding site binds to hPD-L1 with an affinity of less than 100 pM, or less than 50 pM.

[1110] In one embodiment, the antigen binding site binds to hPD-L1 with an affinity of between 50 pM and 500 pM, or between 75 pM and 500 pM, or between 100 pM and 500 pM or between 200 pM and 500 pM.

[1111] In one embodiment, the antigen binding site binds to hPD-L1 with an affinity of between 50 pM and 400 pM, or between 50 pM and 300 pM, or between 50 pM and 200 pM or between 50 pM and 100 pM.

[1112] In one embodiment, the antigen binding site binds to hPD-L1 with an affinity of between 100 pM and 500 pM, or between 100 pM and 400 pM, or between 100 pM and 300 pM.

[1113] In one embodiment, the ratio of the potency of the IL-2 cytokine against the high affinity (αβγ) receptor: affinity of the anti-PD-L1 antigen binding site against hPD-L1 is at least 3:1. In one embodiment, the ratio of the potency of the IL-2 cytokine against the high affinity (αβγ) receptor: affinity of the anti-PD-L1 antigen binding site against hPD-L1 is at least 4:1. In one embodiment, the ratio of the potency of the IL-2 cytokine against the high affinity (αβγ) receptor: affinity of the anti-PD-L1 antigen binding site against hPD-L1 is at least 5:1. In one embodiment, the ratio of the potency of the IL-2 cytokine against the high affinity (αβγ) receptor: affinity of the anti-PD-L1 antigen binding site against hPD-L1 is at least 7:1. In one embodiment, the ratio of the potency of the IL-2 cytokine against the high affinity (αβγ) receptor: affinity of the anti-PD-L1 antigen binding site against hPD-L1 is at least 10:1.

[1114] Any of the half-life, K_{ON} rates, K_{OFF} rates, or binding characteristics of the anti-PD-L1 antibodies in concepts 1 to 40 applu mutatis mutandis to the immunocytokines disclosed herein.

Aspect 50a. An immunocytokine according to any preceding aspect, wherein the antigen binding site binds to mPD-L1 (Seq ID No:325) with an affinity of less than 500 nM (e.g. less than 100 nM, less than 10 nM or less than 1 nm).

[1115] In one embodiment, the antigen binding site binds to hPD-L1 with an affinity of between 1 nM and 500 nM, or between 1 nM and 250 nM, or between 1 nM and 100 nM, or between 1 nM and 50 nM.

[1116] In one embodiment, the antigen binding site binds to hPD-L1 with an affinity of between 10 nM and 500 nM, or between 10 nM and 250 nM, or between 10 nM and 100 nM, or between 1 nM and 50 nM, in particular between 10 nM and 100 nM.

[1117] In one embodiment, the antigen binding site binds to hPD-L1 with an affinity of between 100 nM and 500 nM, or between 100 nM and 400 nM, or between 100 nM and 300 nM, or between 100 nM and 200 nM.

[1118] The affinity of the antigen-binding site to hPD-L1 or mPD-L1 may be measured by any technique well-known to those skilled in the art. In one embodiment, the affinity is measured using SPR, the details of which are provided hereinabove.

Aspect 51. An immunocytokine as defined in any preceding aspect for use in treating or preventing a hPD-L1-mediated disease or condition, e.g. selected from neoplastic or non-neoplastic disease, chronic viral infections, and malignant tumours, such as melanoma, breast cancer, ovarian cancer, Merkel cell carcinoma, non-small cell lung cancer (squamous and non-squamous), renal cell cancer, bladder cancer, colorectal cancer (without MSI or microsatellite instability), head and neck squamous cell carcinoma, mesothelioma, virally induced cancers (such as cervical cancer and nasopharyngeal cancer), soft tissue sarcomas, haematological malignancies such as Hodgkin's and non-Hodgkin's disease, diffuse large B-cell lymphoma (for example melanoma, breast cancer, ovarian cancer, Merkel cell carcinoma, non-small cell lung cancer (squamous and non-squamous), renal cell cancer, bladder cancer, colorectal cancer (without MSI or microsatellite instability), head and neck squamous cell carcinoma and mesothelioma or for example virally induced cancers (such as cervical cancer and nasopharyngeal cancer) and soft tissue sarcomas).
Aspect 52. Use of an immunocytokine as defined in any one of aspects 1 to 50 in the manufacture of a medicament for administration to a human for treating or preventing a hPD-L1 mediated disease or condition in the human, e.g. wherein the hPD-L1 mediated disease or condition is selected from neoplastic or non-neoplastic disease, chronic viral infections, and malignant tumours, such as melanoma, breast cancer, ovarian cancer, Merkel cell carcinoma, non-small cell lung cancer (squamous and non-squamous), renal cell cancer, bladder cancer, colorectal cancer (without MSI or microsatellite instability), head and neck squamous cell carcinoma, mesothelioma, virally induced cancers (such as cervical cancer and nasopharyngeal cancer), soft tissue sarcomas, haematological malignancies such as Hodgkin's and non-Hodgkin's disease, diffuse large B-cell lymphoma (for example melanoma, breast cancer, ovarian cancer, Merkel cell carcinoma, non-small cell lung cancer (squamous and non-squamous), renal cell cancer, bladder cancer, colorectal cancer (without MSI or microsatellite instability), head and neck squamous cell carcinoma and mesothelioma or for example virally induced cancers (such as cervical cancer and nasopharyngeal cancer) and soft tissue sarcomas).
Aspect 53. A method of treating or preventing a hPD-L1 mediated disease or condition, e.g. selected from neoplastic or non-neoplastic disease, chronic viral infections, and malignant tumours, such as melanoma, breast cancer, ovarian cancer, Merkel cell carcinoma, non-small cell lung cancer (squamous and non-squamous), renal cell cancer, bladder cancer, colorectal cancer (without MSI or microsatellite instability), head and neck squamous cell carcinoma, mesothelioma, virally induced cancers (such as cervical cancer and nasopharyngeal cancer), soft tissue sarcomas, haematological malignancies such as Hodgkin's and non-Hodgkin's disease, diffuse large B-cell lymphoma (for example melanoma, breast cancer, ovarian cancer, Merkel cell carcinoma, non-small cell lung cancer (squamous and non-squamous), renal cell cancer, bladder cancer, colorectal cancer (without MSI or microsatellite instability), head and neck squamous cell carcinoma and mesothelioma or for example virally induced cancers (such as cervical cancer and nasopharyngeal cancer) and soft tissue sarcomas) in a human, comprising administering to said human a therapeutically effective amount of an immunocytokine as defined in any one of aspects 1 to 50, wherein the hPD-L1 mediated disease or condition is thereby treated or prevented.

[1119] In any of aspects 51 to 53, the hPD-L1 mediated disease may be any of those as described herein. In one embodiment, in any of aspects 51 to 53, the hPD-L1 mediated disease is a virally induced cancer, such as cervical cancer and nasopharyngeal cancer, for example cervical cancers caused by HPV infection. In one embodiment, in any of aspects 51 to 53, the hPD-L1 mediated disease is a chronic viral infection. In one embodiment, in any of aspects 51 to 53, the hPD-L1 mediated disease is a neoplastic disease. In one embodiment, in any of aspects 51 to 53, the hPD-L1 mediated disease is a non-neoplastic disease. In one embodiment, in any of aspects 51 to 53, the hPD-L1 mediated disease is a malignant tumour. In one embodiment, in any of aspects 51 to 53, the hPD-L1 mediated disease is a cancer which is known to be responsive to PD-L1 therapy, such as melanoma, Merkel cell carcinoma, non-small cell lung cancer (squamous and non-squamous), renal cell cancer, bladder cancer, head and neck squamous cell carcinoma, mesothelioma. In one embodiment, in any of aspects 51 to 53, the hPD-L1 mediated disease is a cancer which is a soft tissue sarcoma. In one embodiment, in any of aspects 51 to 53, the hPD-L1 mediated disease is a neurodegenerative disease, disorder or condition, optionally wherein the neurodegenerative disease, disorder or condition is selected from Alzheimer's disease, amyotrophic lateral sclerosis, Parkinson's disease, Huntington's disease, primary progressive multiple sclerosis, secondary progressive multiple sclerosis, corticobasal degeneration, Rett syndrome, a retinal degeneration disorder selected from age-related macular degeneration and retinitis pigmentosa; anterior ischemic optic neuropathy, glaucoma, uveitis, depression, trauma-associated stress or post-traumatic stress disorder, frontotemporal dementia, Lewy body dementias, mild cognitive impairments, posterior cortical atrophy, primary progressive aphasia and progressive supranuclear palsy or aged-related dementia, in particular Alzheimer's disease, amyotrophic lateral sclerosis, Parkinson's disease and Huntington's disease, and e.g. Alzheimer's disease.

Aspect 54. The immunocytokine according to aspect 51, the use according to aspect 52 or the method according to aspect 53, wherein the hPD-L1-mediated disease or condition is cancer.
Aspect 55. The immunocytokine, the use or the method according to aspect 54, wherein the cancer is selected from melanoma, Merkel cell cancer, non-small cell lung cancer, bladder cancer, Non-Hodgkin's lymphomas, colorectal cancer with microsatellite instability (MSI) or a cancer selected from breast cancer, ovarian cancer, colorectal cancer (without MSI or microsatellite instability), in particular melanoma and renal cell cancer.

[1120] In one embodiment, the cancer is a cancer which is known to be responsive to both IL-2 therapy and PD-L1 therapy, such as melanoma and renal cell cancer.

[1121] In one embodiment, the cancer is colorectal cancer with microsatellite instability (MSI). In one embodiment, the cancer is breast cancer. In one embodiment, the cancer is ovarian cancer.

Aspect 56. The immunocytokine, use or the method according to any one of aspects 51 to 55, further comprising administering to the human a further therapy, for example a further therapeutic agent, optionally wherein the further therapeutic agent is independently selected from the group consisting of:
[1122] A) other immune checkpoint inhibitors (such as anti-TIM-3 antibodies, anti-CTLA-4 antibodies, anti-TIGIT antibodies and anti-LAG-3 antibodies);
[1123] B) immune stimulators (such as anti-OX40 antibodies, anti-GITR antibodies, anti-CD137 antibodies, anti-ICOS antibodies and anti-CD40 antibodies);
[1124] C) chemokine receptor antagonists (such as CXCR4, CCR4 and CXCR2);
[1125] D) targeted kinase inhibitors (such as CSF-1R or VEGFR inhibitors);
[1126] E) angiogenesis inhibitors (such as anti-VEGF-A or Delta-like Ligand-4);
[1127] F) immune stimulating peptides or chemokines (such as CXCL9 or CXCL10);
[1128] G) cytokines (such as IL-15 and IL-21);
[1129] H) bispecific T-cell engagers (BiTEs) having at least one specificity against CD3 (e.g. CD3/CD19 BiTE);
[1130] I) other bi-specific molecules (for example IL-15-containing molecules targeted towards tumour associated antigens, for example Epidermal growth factor receptors such as EGFR, Her-2, New York Esophageal Cancer-1 (NY-ESO-1), GD2, EpCAM or Melanoma Associated Antigen-3 (MAGE-A3));
[1131] J) oncolytic viruses (such as HSV virus (optionally which secretes GMCSF), Newcastle disease virus and Vaccinia virus);
[1132] K) vaccination with tumour associated antigens (such as New York Esophageal Cancer-1 [NY-ESO-1], Melanoma Associated Antigen-3 [MAGE-3]);
[1133] L) cell-based therapies (such as chimeric Antigen Receptor-T-cells (CAR-T) for example expressing anti-CD19, anti-EpCam or anti-mesothelin);
[1134] M) bi-specific NK cell engagers having a specificity against an activating MK receptor such as NKG2D or CD16a; and
[1135] N) adoptive transfer of tumour specific T-cells or LAK cells,
[1136] or optionally wherein the further therapy is chemotherapy, radiotherapy and surgical removal of tumours.

[1137] Radiotherapy may be single dose or in fractionated doses, either delivered to affected tissues directly or to the whole body.

[1138] In this aspect, any of the features and embodiments of concept 46 apply mutatis mutandis.

[1139] In this aspect, the bispecific molecules include “bispecific antibodies” and antibody fusion proteins, including those formats and molecules described in concepts 37 to 40.

[1140] The antibodies may be any of the sequences or antibodies described in arrangement 5, 5a or detailed in Aspect 1a.

Aspect 57. A pharmaceutical composition comprising an immunocytokine as defined in any one of aspects 1 to 50 and a pharmaceutically acceptable excipient, diluent or carrier and optionally further comprising a further therapeutic agent independently selected from the group consisting of:
[1141] A) other immune checkpoint inhibitors (such as anti-TIM-3 antibodies, anti-CTLA-4 antibodies, anti-TIGIT antibodies and anti-LAG-3 antibodies);
[1142] B) immune stimulators (such as anti-OX40 antibodies, anti-GITR antibodies, anti-CD137 antibodies, anti-ICOS antibodies and anti-CD40 antibodies);
[1143] C) chemokine receptor antagonists (such as CXCR4, CCR4 and CXCR2);
[1144] D) targeted kinase inhibitors (such as CSF-1R or VEGFR inhibitors);
[1145] E) angiogenesis inhibitors (such as anti-VEGF-A or Delta-like Ligand-4);
[1146] F) immune stimulating peptides or chemokines (such as CXCL9 or CXCL10);
[1147] G) cytokines (such as IL-15 and IL-21);
[1148] H) bispecific T-cell engagers (BiTEs) having at least one specificity against CD3 (e.g. CD3/CD19 BiTE);
[1149] I) other bi-specific molecules (for example IL-15-containing molecules targeted towards tumour associated antigens, for example Epidermal growth factor receptors such as EGFR, Her-2, New York Esophageal Cancer-1 (NY-ESO-1), GD2, EpCAM or Melanoma Associated Antigen-3 (MAGE-A3));
[1150] J) oncolytic viruses (such as HSV virus (optionally which secretes GMCSF), Newcastle disease virus and Vaccinia virus);
[1151] K) vaccination with tumour associated antigens (such as New York Esophageal Cancer-1 [NY-ESO-1], Melanoma Associated Antigen-3 [MAGE-3]);
[1152] L) cell-based therapies (such as chimeric Antigen Receptor-T-cells (CAR-T) for example expressing anti-CD19, anti-EpCam or anti-mesothelin);
[1153] M) bi-specific NK cell engagers having a specificity against an activating MK receptor such as NKG2D or CD16a; and
[1154] N) adoptive transfer of tumour specific T-cells or LAK cells.

[1155] In one embodiment, the further therapeutic agent is administered sequentially or simultaneously with the immunocytokine.

[1156] In this aspect, any of the features and embodiments of concept 48 apply mutatis mutandis.

[1157] In this aspect, the bispecific molecules include “bispecific antibodies” and antibody fusion proteins, including those formats and molecules described in concepts 37 to 40.

[1158] The antibodies may be any of the sequences or antibodies described in arrangement 5, 5a or detailed in Aspect 1a.

Aspect 58. A pharmaceutical composition according to aspect 57, or a kit comprising a pharmaceutical composition as defined in aspect 57, wherein the composition is for treating and/or preventing a hPD-L1 mediated disease or condition, e.g. selected from neoplastic or non-neoplastic disease, chronic viral infections, and malignant tumours, such as melanoma, breast cancer, ovarian cancer, Merkel cell carcinoma, non-small cell lung cancer (squamous and non-squamous), renal cell cancer, bladder cancer, colorectal cancer (without MSI or microsatellite instability), head and neck squamous cell carcinoma, mesothelioma, virally induced cancers (such as cervical cancer and nasopharyngeal cancer), soft tissue sarcomas, haematological malignancies such as Hodgkin's and non-Hodgkin's disease, diffuse large B-cell lymphoma (for example melanoma, breast cancer, ovarian cancer, Merkel cell carcinoma, non-small cell lung cancer (squamous and non-squamous), renal cell cancer, bladder cancer, colorectal cancer (without MSI or microsatellite instability), head and neck squamous cell carcinoma and mesothelioma or for example virally induced cancers (such as cervical cancer and nasopharyngeal cancer) and soft tissue sarcomas).
Aspect 59. A pharmaceutical composition according to aspect 57 or aspect 58 in combination with, or kit according to aspect 58 comprising a label or instructions for use to treat and/or prevent said disease or condition in a human; optionally wherein the label or instructions comprise a marketing authorisation number (e.g., an FDA or EMA authorisation number); optionally wherein the kit comprises an IV or injection device that comprises the immunocytokine.
Aspect 60. A method of treating a proliferative disease in an animal (e.g. a human), comprising administering an effective amount of an immunocytokine as defined in any one of aspects 1 to 50 to said patient.

[1159] Proliferative diseases may be any as described elsewhere herein.

Aspect 61. A nucleic acid that encodes a heavy chain and/or a light chain of an immunocytokine as defined in any one of aspects 1 to 50.

[1160] In one embodiment, the nucleic acid encodes a light chain of an immunocytokine as defined in any one of aspects 1 to 50.

Aspect 62. A vector comprising the nucleic acid as defined in aspect 61; optionally wherein the vector is a CHO or HEK293 vector.
Aspect 63. A host comprising the nucleic acid as defined in aspect 61 or the vector as defined in aspect 62.

### 4. ICOS Antibodies

[1161] ICOS antibodies are provided herein. The ICOS antibodies may be any of those described in GB patent application 1620414.1 (filed 1 Dec. 2016), the sequences of the anti-ICOS antibodies disclosed therein are incorporated herein by reference.

[1162] STIM001 has a heavy chain variable region (V_{H}) amino acid sequence of Seq ID No:366, comprising the CDRH1 amino acid sequence of Seq ID No:363, the CDRH2 amino acid sequence of Seq ID No:364, and the CDRH3 amino acid sequence of Seq ID No:365. The heavy chain nucleic acid sequence of the V_{H} domain is Seq ID No:367. STIM001 has a light chain variable region (V_{L}) amino acid sequence of Seq ID No:373, comprising the CDRL1 amino acid sequence of Seq ID No:370, the CDRL2 amino acid sequence of Seq ID No:371, and the CDRL3 amino acid sequence of Seq ID No:372. The light chain nucleic acid sequence of the V_{L} domain is Seq ID No:374. The V_{H} domain may be combined with any of the heavy chain constant region sequences described herein, e.g. Seq ID No:193, Seq ID No:195, Seq ID No:197, Seq ID No:199, Seq ID No:201, Seq ID No:203, Seq ID No:205, Seq ID No:340, Seq ID No:524, Seq ID No:526, Seq ID No:528, Seq ID No:530, Seq ID No:532 or Seq ID No:534. The V_{L} domain may be combined with any of the light chain constant region sequences described herein, e.g. Seq ID Nos:207, 209, 211, 213, 215, 217, 219, 221, 223, 225, 227, 229, 231, 233, 235, 237, 536 and 538. A full length heavy chain amino acid sequence is Seq ID No:368 (heavy chain nucleic acid sequence Seq ID No:369). A full length light chain amino acid sequence is Seq ID No:375 (light chain nucleic acid sequence Seq ID No:376).

[1163] STIM002 has a heavy chain variable region (V_{H}) amino acid sequence of Seq ID No:380, comprising the CDRH1 amino acid sequence of Seq ID No:377, the CDRH2 amino acid sequence of Seq ID No:378, and the CDRH3 amino acid sequence of Seq ID No:379. The heavy chain nucleic acid sequence of the V_{H} domain is Seq ID No:381. STIM002 has a light chain variable region (V_{L}) amino acid sequence of Seq ID No:387, comprising the CDRL1 amino acid sequence of Seq ID No:384, the CDRL2 amino acid sequence of Seq ID No:385, and the CDRL3 amino acid sequence of Seq ID No:386. The light chain nucleic acid sequence of the V_{L} domain is Seq ID No:388 or Seq ID No:519. The V_{H} domain may be combined with any of the heavy chain constant region sequences described herein, e.g. Seq ID No:193, Seq ID No:195, Seq ID No:197, Seq ID No:199, Seq ID No:201, Seq ID No:203, Seq ID No:205, Seq ID No:340, Seq ID No:524, Seq ID No:526, Seq ID No:528, Seq ID No:530, Seq ID No:532 or Seq ID No:534. The V_{L} domain may be combined with any of the light chain constant region sequences described herein, e.g. Seq ID Nos:207, 209, 211, 213, 215, 217, 219, 221, 223, 225, 227, 229, 231, 233, 235, 237, 536 and 538. A full length heavy chain amino acid sequence is Seq ID No:382 (heavy chain nucleic acid sequence Seq ID No:383). A full length light chain amino acid sequence is Seq ID No:389 (light chain nucleic acid sequence Seq ID No:390 or or Seq ID No:520).

[1164] STIM002-B has a heavy chain variable region (V_{H}) amino acid sequence of Seq ID No:394, comprising the CDRH1 amino acid sequence of Seq ID No:391, the CDRH2 amino acid sequence of Seq ID No:392, and the CDRH3 amino acid sequence of Seq ID No:393. The heavy chain nucleic acid sequence of the V_{H} domain is Seq ID No:395. STIM002-B has a light chain variable region (V_{L}) amino acid sequence of Seq ID No:401, comprising the CDRL1 amino acid sequence of Seq ID No:398, the CDRL2 amino acid sequence of Seq ID No:399, and the CDRL3 amino acid sequence of Seq ID No:400. The light chain nucleic acid sequence of the V_{L} domain is Seq ID No:402. The V_{H} domain may be combined with any of the heavy chain constant region sequences described herein, e.g. Seq ID No:193, Seq ID No:195, Seq ID No:197, Seq ID No:199, Seq ID No:201, Seq ID No:203, Seq ID No:205, Seq ID No:340, Seq ID No:524, Seq ID No:526, Seq ID No:528, Seq ID No:530, Seq ID No:532 or Seq ID No:534. The V_{L} domain may be combined with any of the light chain constant region sequences described herein, e.g. Seq ID Nos:207, 209, 211, 213, 215, 217, 219, 221, 223, 225, 227, 229, 231, 233, 235, 237, 536 and 538. A full length heavy chain amino acid sequence is Seq ID No:396 (heavy chain nucleic acid sequence Seq ID No:397). A full length light chain amino acid sequence is Seq ID No:403 (light chain nucleic acid sequence Seq ID No:404).

[1165] STIM003 has a heavy chain variable region (V_{H}) amino acid sequence of Seq ID No:408, comprising the CDRH1 amino acid sequence of Seq ID No:405, the CDRH2 amino acid sequence of Seq ID No:406, and the CDRH3 amino acid sequence of Seq ID No:407. The heavy chain nucleic acid sequence of the V_{H} domain is Seq ID No:409 or Seq ID No:521. STIM003 has a light chain variable region (V_{L}) amino acid sequence of Seq ID No:415, comprising the CDRL1 amino acid sequence of Seq ID No:412, the CDRL2 amino acid sequence of Seq ID No:413, and the CDRL3 amino acid sequence of Seq ID No:414. The light chain nucleic acid sequence of the V_{L} domain is Seq ID No:4416. The V_{H} domain may be combined with any of the heavy chain constant region sequences described herein, e.g. Seq ID No:193, Seq ID No:195, Seq ID No:197, Seq ID No:199, Seq ID No:201, Seq ID No:203, Seq ID No:205, Seq ID No:340, Seq ID No:524, Seq ID No:526, Seq ID No:528, Seq ID No:530, Seq ID No:532 or Seq ID No:534. The V_{L} domain may be combined with any of the light chain constant region sequences described herein, e.g. Seq ID Nos:207, 209, 211, 213, 215, 217, 219, 221, 223, 225, 227, 229, 231, 233, 235, 237, 536 and 538. A full length heavy chain amino acid sequence is Seq ID No:410 (heavy chain nucleic acid sequence Seq ID No:411 or Seq ID No:522). A full length light chain amino acid sequence is Seq ID No:417 (light chain nucleic acid sequence Seq ID No:418).

[1166] STIM004 has a heavy chain variable region (V_{H}) amino acid sequence of Seq ID No:422, comprising the CDRH1 amino acid sequence of Seq ID No:419, the CDRH2 amino acid sequence of Seq ID No:420, and the CDRH3 amino acid sequence of Seq ID No:421. The heavy chain nucleic acid sequence of the V_{H} domain is Seq ID No:423. STIM004 has a light chain variable region (V_{L}) amino acid sequence of Seq ID No:429, comprising the CDRL1 amino acid sequence of Seq ID No:426, the CDRL2 amino acid sequence of Seq ID No:427, and the CDRL3 amino acid sequence of Seq ID No:428. The light chain nucleic acid sequence of the V_{L} domain is Seq ID No:430 or Seq ID No:431. The V_{H} domain may be combined with any of the heavy chain constant region sequences described herein, e.g. Seq ID No:193, Seq ID No:195, Seq ID No:197, Seq ID No:199, Seq ID No:201, Seq ID No:203, Seq ID No:205, Seq ID No:340, Seq ID No:524, Seq ID No:526, Seq ID No:528, Seq ID No:530, Seq ID No:532 or Seq ID No:534. The V_{L} domain may be combined with any of the light chain constant region sequences described herein, e.g. Seq ID Nos:207, 209, 211, 213, 215, 217, 219, 221, 223, 225, 227, 229, 231, 233, 235, 237, 536 and 538. A full length heavy chain amino acid sequence is Seq ID No:424 (heavy chain nucleic acid sequence Seq ID No:425). A full length light chain amino acid sequence is Seq ID No:432 (light chain nucleic acid sequence Seq ID No:433 or Seq ID no: 434).

[1167] STIM005 has a heavy chain variable region (V_{H}) amino acid sequence of Seq ID No:438, comprising the CDRH1 amino acid sequence of Seq ID No:435, the CDRH2 amino acid sequence of Seq ID No:436, and the CDRH3 amino acid sequence of Seq ID No:437. The heavy chain nucleic acid sequence of the V_{H} domain is Seq ID No:439. STIM005 has a light chain variable region (V_{L}) amino acid sequence of Seq ID No:445, comprising the CDRL1 amino acid sequence of Seq ID No:442, the CDRL2 amino acid sequence of Seq ID No:443, and the CDRL3 amino acid sequence of Seq ID No:444. The light chain nucleic acid sequence of the V_{L} domain is Seq ID No:446. The V_{H} domain may be combined with any of the heavy chain constant region sequences described herein, e.g. Seq ID No:193, Seq ID No:195, Seq ID No:197, Seq ID No:199, Seq ID No:201, Seq ID No:203, Seq ID No:205, Seq ID No:340, Seq ID No:524, Seq ID No:526, Seq ID No:528, Seq ID No:530, Seq ID No:532 or Seq ID No:534. The V_{L} domain may be combined with any of the light chain constant region sequences described herein, e.g. Seq ID Nos:207, 209, 211, 213, 215, 217, 219, 221, 223, 225, 227, 229, 231, 233, 235, 237, 536 and 538. A full length heavy chain amino acid sequence is Seq ID No:440 (heavy chain nucleic acid sequence Seq ID No:441). A full length light chain amino acid sequence is Seq ID No:447 (light chain nucleic acid sequence Seq ID No:448).

[1168] STIM006 has a heavy chain variable region (V_{H}) amino acid sequence of Seq ID No:452, comprising the CDRH1 amino acid sequence of Seq ID No:449, the CDRH2 amino acid sequence of Seq ID No:450, and the CDRH3 amino acid sequence of Seq ID No:451. The heavy chain nucleic acid sequence of the V_{H} domain is Seq ID No:453. STIM006 has a light chain variable region (V_{L}) amino acid sequence of Seq ID No:459, comprising the CDRL1 amino acid sequence of Seq ID No:456, the CDRL2 amino acid sequence of Seq ID No:457, and the CDRL3 amino acid sequence of Seq ID No:458. The light chain nucleic acid sequence of the V_{L} domain is Seq ID No:460. The V_{H} domain may be combined with any of the heavy chain constant region sequences described herein, e.g. Seq ID No:193, Seq ID No:195, Seq ID No:197, Seq ID No:199, Seq ID No:201, Seq ID No:203, Seq ID No:205, Seq ID No:340, Seq ID No:524, Seq ID No:526, Seq ID No:528, Seq ID No:530, Seq ID No:532 or Seq ID No:534. The V_{L} domain may be combined with any of the light chain constant region sequences described herein, e.g. Seq ID Nos:207, 209, 211, 213, 215, 217, 219, 221, 223, 225, 227, 229, 231, 233, 235, 237, 536 and 538. A full length heavy chain amino acid sequence is Seq ID No:454 (heavy chain nucleic acid sequence Seq ID No:455). A full length light chain amino acid sequence is Seq ID No:461 (light chain nucleic acid sequence Seq ID No:462).

[1169] STIM007 has a heavy chain variable region (V_{H}) amino acid sequence of Seq ID No:466, comprising the CDRH1 amino acid sequence of Seq ID No:463, the CDRH2 amino acid sequence of Seq ID No:464, and the CDRH3 amino acid sequence of Seq ID No:465. The heavy chain nucleic acid sequence of the V_{H} domain is Seq ID No:467. STIM007 has a light chain variable region (V_{L}) amino acid sequence of Seq ID No:473, comprising the CDRL1 amino acid sequence of Seq ID No:470, the CDRL2 amino acid sequence of Seq ID No:471, and the CDRL3 amino acid sequence of Seq ID No:472. The light chain nucleic acid sequence of the V_{L} domain is Seq ID No:474. The V_{H} domain may be combined with any of the heavy chain constant region sequences described herein, e.g. Seq ID No:193, Seq ID No:195, Seq ID No:197, Seq ID No:199, Seq ID No:201, Seq ID No:203, Seq ID No:205, Seq ID No:340, Seq ID No:524, Seq ID No:526, Seq ID No:528, Seq ID No:530, Seq ID No:532 or Seq ID No:534. The V_{L} domain may be combined with any of the light chain constant region sequences described herein, e.g. Seq ID Nos:207, 209, 211, 213, 215, 217, 219, 221, 223, 225, 227, 229, 231, 233, 235, 237, 536 and 538. A full length heavy chain amino acid sequence is Seq ID No:468 (heavy chain nucleic acid sequence Seq ID No:469). A full length light chain amino acid sequence is Seq ID No:475 (light chain nucleic acid sequence Seq ID No:476).

[1170] STIM008 has a heavy chain variable region (V_{H}) amino acid sequence of Seq ID No:480, comprising the CDRH1 amino acid sequence of Seq ID No:477, the CDRH2 amino acid sequence of Seq ID No:478, and the CDRH3 amino acid sequence of Seq ID No:479. The heavy chain nucleic acid sequence of the V_{H} domain is Seq ID No:481. STIM008 has a light chain variable region (V_{L}) amino acid sequence of Seq ID No:487, comprising the CDRL1 amino acid sequence of Seq ID No:484, the CDRL2 amino acid sequence of Seq ID No:485, and the CDRL3 amino acid sequence of Seq ID No:486. The light chain nucleic acid sequence of the V_{L} domain is Seq ID No:488. The V_{H} domain may be combined with any of the heavy chain constant region sequences described herein, e.g. Seq ID No:193, Seq ID No:195, Seq ID No:197, Seq ID No:199, Seq ID No:201, Seq ID No:203, Seq ID No:205, Seq ID No:340, Seq ID No:524, Seq ID No:526, Seq ID No:528, Seq ID No:530, Seq ID No:532 or Seq ID No:534. The V_{L} domain may be combined with any of the light chain constant region sequences described herein, e.g. Seq ID Nos:207, 209, 211, 213, 215, 217, 219, 221, 223, 225, 227, 229, 231, 233, 235, 237, 536 and 538. A full length heavy chain amino acid sequence is Seq ID No:482 (heavy chain nucleic acid sequence Seq ID No:483). A full length light chain amino acid sequence is Seq ID No:489 (light chain nucleic acid sequence Seq ID No:490).

[1171] STIM009 has a heavy chain variable region (V_{H}) amino acid sequence of Seq ID No:494, comprising the CDRH1 amino acid sequence of Seq ID No:491, the CDRH2 amino acid sequence of Seq ID No:492, and the CDRH3 amino acid sequence of Seq ID No:493. The heavy chain nucleic acid sequence of the V_{H} domain is Seq ID No:495. STIM009 has a light chain variable region (V_{L}) amino acid sequence of Seq ID No:501, comprising the CDRL1 amino acid sequence of Seq ID No:498, the CDRL2 amino acid sequence of Seq ID No:499, and the CDRL3 amino acid sequence of Seq ID No:500. The light chain nucleic acid sequence of the V_{L} domain is Seq ID No:502. The V_{H} domain may be combined with any of the heavy chain constant region sequences described herein, e.g. Seq ID No:193, Seq ID No:195, Seq ID No:197, Seq ID No:199, Seq ID No:201, Seq ID No:203, Seq ID No:205, Seq ID No:340, Seq ID No:524, Seq ID No:526, Seq ID No:528, Seq ID No:530, Seq ID No:532 or Seq ID No:534. The V_{L} domain may be combined with any of the light chain constant region sequences described herein, e.g. Seq ID Nos:207, 209, 211, 213, 215, 217, 219, 221, 223, 225, 227, 229, 231, 233, 235, 237, 536 and 538. A full length heavy chain amino acid sequence is Seq ID No:496 (heavy chain nucleic acid sequence Seq ID No:497). A full length light chain amino acid sequence is Seq ID No:503 (light chain nucleic acid sequence Seq ID No:504).

[1172] Antibodies STIM001-009 are described in more detail in GB patent application 1620414.1 (filed 1 Dec. 2016), the contents of which are incorporated herein by reference. ICOS antibodies may also be described as in the following numbered sentences below:

Sentence 1. An isolated antibody that binds the extracellular domain of human and/or mouse ICOS, comprising:
[1173] an antibody V_{H} domain comprising complementarity determining regions (CDRs) HCDR1, HCDR2 and HCDR3, and
[1174] an antibody V_{L} domain comprising complementarity determining regions LCDR1, LCDR2 and LCDR3, wherein
   [1175] HCDR1 is the HCDR1 of STIM001, STIM002, STIM002-B, STIM003, STIM004, STIM005, STIM006, STIM007, STIM008 or STIM009, or comprises that HCDR1 with 1, 2, 3, 4 or 5 amino acid alterations,
   [1176] HCDR2 is the HCDR2 of STIM001, STIM002, STIM002-B, STIM003, STIM004, STIM005, STIM006, STIM007, STIM008 or STIM009, or comprises that HCDR2 with 1, 2, 3, 4 or 5 amino acid alterations, and/or
   [1177] HCDR3 is the HCDR3 of STIM001, STIM002, STIM002-B, STIM003, STIM004, STIM005, STIM006, STIM007, STIM008 or STIM009 or comprises that HCDR3 with 1, 2, 3, 4 or 5 amino acid alterations.
      Sentence 2. An antibody according to sentence 1, wherein the antibody heavy chain CDRs are those of STIM001, STIM002, STIM002-B, STIM003, STIM004, STIM005, STIM006, STIM007, STIM008 or STIM009 or comprise the STIM001, STIM002, STIM002-B, STIM003, STIM004, STIM005, STIM006, STIM007, STIM008 or STIM009 heavy chain CDRs with 1, 2, 3, 4 or 5 amino acid alterations.
      Sentence 3. An antibody according to sentence 2, wherein the antibody V_{H} domain has the heavy chain CDRs of STIM003.
      Sentence 4. An isolated antibody that binds the extracellular domain of human and/or mouse ICOS, comprising:
[1178] an antibody V_{H} domain comprising complementarity determining regions HCDR1, HCDR2 and HCDR3, and
[1179] an antibody V_{L} domain comprising complementarity determining regions LCDR1, LCDR2 and LCDR3,
   [1180] wherein LCDR1 is the LCDR1 of STIM001, STIM002, STIM002-B, STIM003, STIM004 STIM005, STIM006, STIM007, STIM008 or STIM009, or comprises that LCDR1 with 1, 2, 3, 4 or 5 amino acid alterations,
   [1181] LCDR2 is the LCDR2 of STIM001, STIM002, STIM002-B, STIM003, STIM004, STIM005, STIM006, STIM007, STIM008 or STIM009, or comprises that LCDR2 with 1, 2, 3, 4 or 5 amino acid alterations, and/or
   [1182] LCDR3 is the LCDR3 of STIM001, STIM002, STIM002-B, STIM003, STIM004, STIM005, STIM006, STIM007, STIM008 or STIM009 or comprises that LCDR3 with 1, 2, 3, 4 or 5 amino acid alterations.
      Sentence 5. An antibody according to any preceding sentence, wherein the antibody light chain CDRs are those of STIM001, STIM002, STIM002-B, STIM003, STIM004, STIM005, STIM006, STIM007, STIM008 or STIM009, or comprise the STIM001, STIM002, STIM002-B, STIM003, STIM004, STIM005, STIM006, STIM007, STIM008 or STIM009 light chain CDRs with 1, 2, 3, 4 or 5 amino acid alterations.
      Sentence 6. An antibody according to sentence 5, wherein the antibody V_{L} domain has the light chain CDRs of STIM003.
      Sentence 7. An antibody according to any of the preceding sentences, comprising V_{H} and/or V_{L} domain framework regions of human germline gene segment sequences.
      Sentence 8. An antibody according to any of the preceding sentences, comprising a V_{H} domain which
[1183] (i) is derived from recombination of a human heavy chain V gene segment, a human heavy chain D gene segment and a human heavy chain J gene segment, wherein
   [1184] the V segment is IGHV1-18 (e.g., V1-18*01), IGVH3-20 (e.g. V3-20*d01), IGVH3-11 (e.g, V3-11*01) or IGVH2-5 (e.g., V2-5*10);
   [1185] the D gene segment is IGHD6-19 (e.g., IGHD6-19*01), IGHD3-10 (e.g., IGHD3-10*01) or IGHD3-9 (e.g., IGHD3-9*01); and/or
   [1186] the J gene segment is IGHJ6 (e.g., IGHJ6*02), IGHJ4 (e.g., IGHJ4*02) or IGHJ3 (e.g., IGHJ3*02), or
[1187] (ii) comprises framework regions FR1, FR2, FR3 and FR4, wherein
   [1188] FR1 aligns with human germline V gene segment IGHV1-18 (e.g., V1-18*01), IGVH3-20 (e.g. V3-20*d01), IGVH3-11 (e.g, V3-11*01) or IGVH2-5 (e.g., V2-5*10), optionally with 1, 2, 3, 4 or 5 amino acid alterations,
   [1189] FR2 aligns with human germline V gene segment IGHV1-18 (e.g., V1-18*01), IGVH3-20 (e.g. V3-20*d01), IGVH3-11 (e.g, V3-11*01) or IGVH2-5 (e.g., V2-5*10), optionally with 1, 2, 3, 4 or 5 amino acid alterations,
   [1190] FR3 aligns with human germline V gene segment IGHV1-18 (e.g., V1-18*01), IGVH3-20 (e.g. V3-20*d01), IGVH3-11 (e.g, V3-11*01) or IGVH2-5 (e.g., V2-5*10), optionally with 1, 2, 3, 4 or 5 amino acid alterations, and/or
   [1191] FR4 aligns with human germline 3 gene segment IGJH6 (e.g., JH6*02), IGJH4 (e.g., JH4*02) or IGJH3 (e.g., JH3*02), optionally with 1, 2, 3, 4 or 5 amino acid alterations.
      Sentence 9. An antibody according to any of the preceding sentences, comprising an antibody V_{L} domain which
[1192] (i) is derived from recombination of a human light chain V gene segment and a human light chain 3 gene segment, wherein
   [1193] the V segment is IGKV2-28 (e.g., IGKV2-28*01), IGKV3-20 (e.g., IGKV3-20*01), IGKV1D-39 (e.g., IGKV1D-39*01) or IGKV3-11 (e.g., IGKV3-11*01), and/or the 3 gene segment is IGKJ4 (e.g., IGKJ4*01), IGKJ2 (e.g., IGKJ2*04), IGLJ3 (e.g., IGKJ3*01) or IGKJ1 (e.g., IGKJ1*01); or
[1194] (ii) comprises framework regions FR1, FR2, FR3 and FR4, wherein
   [1195] FR1 aligns with human germline V gene segment IGKV2-28 (e.g., IGKV2-28*01), IGKV3-20 (e.g., IGKV3-20*01), IGKV1D-39 (e.g., IGKV1D-39*01) or IGKV3-11 (e.g., IGKV3-11*01), optionally with 1, 2, 3, 4 or 5 amino acid alterations,
   [1196] FR2 aligns with human germline V gene segment IGKV2-28 (e.g., IGKV2-28*01), IGKV3-20 (e.g., IGKV3-20*01), IGKV1D-39 (e.g., IGKV1D-39*01) or IGKV3-11 (e.g., IGKV3-11*01), optionally with 1, 2, 3, 4 or 5 amino acid alterations,
   [1197] FR3 aligns with human germline V gene segment IGKV2-28 (e.g., IGKV2-28*01), IGKV3-20 (e.g., IGKV3-20*01), IGKV1D-39 (e.g., IGKV1D-39*01) or IGKV3-11 (e.g., IGKV3-11*01), optionally with 1, 2, 3, 4 or 5 amino acid alterations, and/or
   [1198] FR4 aligns with human germline 3 gene segment IGKJ4 (e.g., IGKJ4*01), IGKJ2 (e.g., IGKJ2*04), IGKJ3 (e.g., IGKJ3*01) or IGKJ1 (e.g., IGKJ4*01), optionally with 1, 2, 3, 4 or 5 amino acid alterations.
      Sentence 10. An antibody according to any of the preceding sentences, comprising an antibody VH domain which is the V_{H} domain of STIM001, STIM002, STIM002-B, STIM003, STIM004, STIM005, STIM006, STIM007, STIM008 or STIM009, or which has an amino acid sequence at least 90% identical to the antibody VH domain sequence of STIM001, STIM002, STIM002-B, STIM003, STIM004, STIM005, STIM006, STIM007, STIM008 or STIM009.
      Sentence 11. An antibody according to any of the preceding sentences, comprising an antibody VL domain which is the V_{L} domain of STIM001, STIM002, STIM002-B, STIM003, STIM004, STIM005, STIM006, STIM007, STIM008 or STIM009, or which has an amino acid sequence at least 90% identical to the antibody VL domain sequence of STIM001, STIM002, STIM002-B, STIM003, STIM004, STIM005, STIM006, STIM007, STIM008 or STIM009.
      Sentence 12. An antibody according to sentence 11, comprising

[1199] an antibody V_{H} domain which is selected from the VH domain of STIM001, STIM002, STIM002-B, STIM003, STIM004, STIM005, STIM006, STIM007, STIM008 or STIM009, or which has an amino acid sequence at least 90% identical to the antibody VH domain sequence of STIM001, STIM002, STIM002-B, STIM003, STIM004, STIM005, STIM006, STIM007, STIM008 or STIM009, and
[1200] an antibody V_{L} domain which is the V_{L} domain of said selected antibody, or which has an amino acid sequence at least 90% identical to the antibody V_{L} domain sequence of said selected antibody.
   Sentence 13. An antibody according to sentence 12, comprising the STIM003 V_{H} domain and the STIM003 V_{L} domain.
   Sentence 14. An antibody according to any of the preceding sentences, comprising an antibody constant region.
   Sentence 15. An antibody according to sentence 14, wherein the constant region comprises a human heavy and/or light chain constant region.
   Sentence 16. An antibody according to sentence 14 or sentence 15, wherein the constant region is Fc effector positive.
   Sentence 17. An antibody according to sentence 16, comprising an Fc region that has enhanced ADCC, ADCP and/or CDC function compared with a native human Fc region.
   Sentence 18. An antibody according to any of sentences 14 to 17, wherein the antibody is an IgG1.
   Sentence 19. An antibody according to sentence 17 or sentence 18, wherein the antibody is afucosylated.
   Sentence 20. An antibody according to any of the preceding sentences which is conjugated to a cytotoxic drug or pro-drug.
   Sentence 21. An antibody according to any of the preceding sentences, which is a multispecific antibody.
   Sentence 22. An isolated antibody that competes for binding to human ICOS with a human IgG1 antibody comprising the heavy and light chain complementarity determining regions of STIM001, STIM002, STIM002-B, STIM003, STIM004, STIM005, STIM006, STIM007, STIM008 or STIM009.
   Sentence 23. An isolated antibody that binds the extracellular domain of human and mouse ICOS with an affinity (KD) of less than 50 nM as determined by surface plasmon resonance.
   Sentence 24. An antibody according to sentence 23, wherein the antibody binds the extracellular domain of human and mouse ICOS with an affinity (KD) of less than 5 nM as determined by surface plasmon resonance.
   Sentence 25. An antibody according to sentence 23 or sentence 24, wherein the KD of binding the extracellular domain of human ICOS is within 10-fold of the KD of binding the extracellular domain of mouse ICOS.
   Sentence 26. A composition comprising an isolated antibody according to any of the preceding sentences and a pharmaceutically acceptable excipient.
   Sentence 27. A composition comprising isolated nucleic acid encoding an antibody according to any of sentences 1 to 25 and a pharmaceutically acceptable excipient.
   Sentence 28. A method of depleting regulatory T-cells and/or increasing effector T-cell response in a patient comprising administering a composition according to sentence 26 to the patient.
   Sentence 29. A method of treating a disease or condition amenable to therapy by depleting regulatory T-cells and/or increasing effector T-cell response in a patient, the method comprising administering a composition according to sentence 26 to the patient.
   Sentence 30. A composition according to sentence 26 for use in a method of treatment of the human body by therapy.
   Sentence 31. A composition for use according to sentence 30, for use in depleting regulatory T-cells and/or increasing effector T-cell response in a patient.
   Sentence 32. A composition for use according to sentence 30, for use in treating a disease or condition amenable to therapy by depleting regulatory T-cells and/or increasing effector T-cell response in a patient.
   Sentence 33. A method according to sentence 29, or a composition for use according to sentence 32, wherein the disease is a cancer or a solid tumour.
   Sentence 34. A method or a composition for use according to any of sentences 29 to 33, wherein the method comprises administering the antibody and another therapeutic agent to the patient.
   Sentence 35. A method or composition for use according to sentence 34, wherein the therapeutic agent is an anti-PDL1 antibody.
   Sentence 36. A method or composition for use according to sentence 35, wherein the anti-ICOS antibody and the anti-PDL1 antibody are each able to mediate ADCC, ADCP and/or CDC.
   Sentence 37. A method or composition for use according to sentence 35, wherein the anti-ICOS antibody is a human IgG1 antibody and the anti-PDL1 antibody is a human IgG1 antibody.
   Sentence 38. A method or composition for use according to sentence 34, wherein the other therapeutic agent is IL-2.
   Sentence 39. A method or composition for use according to any of sentences 34 to 38, wherein the method comprises administering the anti-ICOS antibody after administering the other therapeutic agent.
   Sentence 40. A method or a composition for use according to any of sentences 28 to 39, wherein
[1201] the anti-ICOS antibody is conjugated to a pro-drug, and wherein
[1202] the method or use comprises
[1203] administering the anti-ICOS antibody to a patient and
[1204] selectively activating the pro-drug at a target tissue site.
   Sentence 41. A method or a composition for use according to sentence 40, wherein the patient has a solid tumour and the method comprises selectively activating the pro-drug in the tumour.
   Sentence 42. A method or a composition for use according to sentence 40 or sentence 41, comprising selectively activating the pro-drug through photoactivation.
   Sentence 43. Combination of anti-ICOS human IgG1 antibody and anti-PDL1 human IgG1 antibody for use in a method of treating cancer.
   Sentence 44. Combination according to sentence 43, wherein the anti-ICOS antibody and the anti-PDL1 antibody are provided in separate compositions for administration.
   Sentence 45. A method or composition for use according to sentence 37, or a combination according to sentence 43 or sentence 44, wherein the human IgG1 constant region has a wild type amino acid sequence shown in the appended sequence listing.
   Sentence 46. Anti-ICOS antibody for use in a method of reducing or reversing a surge in ICOS-positive regulatory T-cells in a patient, wherein the surge results from treatment of the patient with another therapeutic agent.
   Sentence 47. A method of treating a patient, the method comprising reducing or reversing a surge in ICOS-positive regulatory T-cells in the patient, wherein the surge results from treatment of the patient with another therapeutic agent.
   Sentence 48. Anti-ICOS antibody for use in a method of treating a patient, the method comprising comprising administering the anti-ICOS antibody to a patient who has an increased level of ICOS-positive regulatory T-cells following treatment with another therapeutic agent.
   Sentence 49. A method of treating a patient, the method comprising administering an anti-ICOS antibody to a patient who has an increased level of ICOS-positive regulatory T-cells following treatment with another therapeutic agent.
   Sentence 50. An anti-ICOS antibody for use according to sentence 46 or sentence 48, or a method according to sentence 47 or sentence 49, wherein the method comprises administering a therapeutic agent to the patient, determining that the patient has an increased level of ICOS-positive regulatory T-cells following the treatment with said agent, and administering an anti-ICOS antibody to the patient to reduce the level of regulatory T-cells.
   Sentence 51. An anti-ICOS antibody for use or a method according to any of sentences 46 to 50, wherein the therapeutic agent is IL-2 or an immunomodulatory antibody (e.g., anti-PDL-1, anti-PD-1 or anti-CTLA-4).
   Sentence 52. An anti-ICOS antibody for use or a method according to any of sentences 46 to 51, wherein the method comprises treating a tumour, e.g., melanoma, such as metastatic melanoma.
   Sentence 53. Anti-ICOS antibody for use in a method of treating cancer in a patient by in vivo vaccination of the patient against their cancer cells, the method comprising
[1205] treating the patient with a therapy that causes immunological cell death of the cancer cells, resulting in presentation of antigen to antigen-specific effector T-cells, and
[1206] administering an anti-ICOS antibody to the patient, wherein the anti-ICOS antibody enhances the antigen-specific effector T-cell response.
   Sentence 54. A method of treating cancer in a patient by in vivo vaccination of the patient against their cancer cells, the method comprising
[1207] treating the patient with a therapy that causes immunological cell death of the cancer cells, resulting in presentation of antigen to antigen-specific effector T-cells, and
[1208] administering an anti-ICOS antibody to the patient, wherein the anti-ICOS antibody enhances the antigen-specific effector T-cell response.
   Sentence 55. A method of treating cancer in a patient by in vivo vaccination of the patient against their cancer cells, the method comprising administering an anti-ICOS antibody to the patient, wherein
[1209] the patient is one who has been previously treated with a therapy that causes immunological cell death of the cancer cells, resulting in presentation of antigen to antigen-specific effector T-cells, and wherein
[1210] the anti-ICOS antibody enhances the antigen-specific effector T-cell response.
   Sentence 56. Anti-ICOS antibody for use or a method according to any of sentences 53 to 55, wherein the therapy that causes immunological cell death is radiation of the cancer cells, administration of a chemotherapeutic agent and/or administration of an antibody directed to a tumour-associated antigen.
   Sentence 57. Anti-ICOS antibody for use or a method according to sentence 56, wherein the chemotherapeutic agent is oxaliplatin.
   Sentence 58. Anti-ICOS antibody for use or a method according to sentence 56, wherein the tumour-associated antigen is HER2 or CD20.
   Sentence 59. Anti-ICOS antibody for use in a method of vaccinating a patient, the method comprising administering the antibody and a vaccine composition to the patient.
   Sentence 60. A method of vaccinating a patient, the method comprising administering an anti-ICOS antibody and a vaccine composition to the patient.
   Sentence 61. Anti-ICOS antibody for use according to sentence 59, or a method according to sentence 60, wherein the vaccine composition is a vaccine against hepatitis B, malaria or HIV.
   Sentence 62. Anti-ICOS antibody for use in a method of treating a cancer in a patient, wherein the cancer is or has been characterised as being positive for expression of ICOS ligand and/or FOXP3.
   Sentence 63. A method of treating a cancer in a patient, wherein the cancer is or has been characterised as being positive for expression of ICOS ligand and/or FOXP3, the method comprising administering an anti-ICOS antibody to the patient.
   Sentence 64. Anti-ICOS antibody for use according to sentence 62, or a method according to sentence 63, wherein the method comprises:
[1211] testing a sample from a patient to determine that the cancer expresses ICOS ligand and/or FOXP3;
[1212] selecting the patient for treatment with the anti-ICOS antibody; and
[1213] administering the anti-ICOS antibody to the patient.
   Sentence 65. Anti-ICOS antibody for use according to sentence 62, or a method according to sentence 63, wherein the method comprises administering an anti-ICOS antibody to a patient from whom a test sample has indicated that the cancer is positive for expression of ICOS ligand and/or FOXP3.
   Sentence 66. Anti-ICOS antibody for use or a method according to sentence 64 or sentence 65, wherein the sample is biopsy sample of a solid tumour.
   Sentence 67. Anti-ICOS antibody for use in a method of treating a cancer in a patient, wherein the cancer is or has been characterised as being refractory to treatment with an immunooncology drug, e.g., anti-CTLA-4 antibody, anti-PD1 antibody, anti-PD-L1 antibody, anti-CD137 antibody or anti-GITR antibody.
   Sentence 68. A method of treating a cancer in a patient, wherein the cancer is or has been characterised as being refractory to treatment with an immunooncology drug, e.g., anti-CTLA-4 antibody, anti-PD1 antibody, anti-PD-L1 antibody, anti-CD137 antibody or anti-GITR antibody, the method comprising administering an anti-ICOS antibody to the patient.
   Sentence 69. Anti-ICOS antibody for use according to sentence 67 or a method according to sentence 68, wherein the method comprises:
[1214] treating the patient with the immunooncology drug;
[1215] determining that the cancer is not responsive to the drug;
[1216] selecting the patient for treatment with the anti-ICOS antibody; and
[1217] administering the anti-ICOS antibody to the patient.
   Sentence 70. Anti-ICOS antibody for use according to sentence 67, or a method according to sentence 68, wherein the method comprises administering an anti-ICOS antibody to a patient whose cancer was not responsive to prior treatment with the immunooncology drug.
   Sentence 71. Anti-ICOS antibody for use or a method according to any of sentences 62 to 70, wherein the cancer is a tumour derived from cells that have acquired ability to express ICOS ligand.
   Sentence 72. Anti-ICOS antibody for use or a method according to sentence 71, wherein the cancer is melanoma.
   Sentence 73. Anti-ICOS antibody for use or a method according to any of sentences 62 to 70, wherein the cancer is derived from an antigen-presenting cell, such as a B lymphocyte (e.g., B cell lymphoma, such as diffused large B cell lymphoma) or a T lymphocyte.
   Sentence 74. Anti-ICOS antibody for use or a method according to any of sentences 62 to 70, wherein the cancer is resistant to treatment with an anti-CD20 antibody.
   Sentence 75. Anti-ICOS antibody for use or a method according to sentence 74, wherein the cancer is B cell lymphoma.
   Sentence 76. Anti-ICOS antibody for use or a method according to sentence 75, wherein the anti-CD20 antibody is rituximab.
   Sentence 77. Anti-ICOS antibody for use or a method according to any of sentences 74 to 76, wherein the method comprises treating the patient with the anti-CD20 antibody;
[1218] determining that the cancer is not responsive to the anti-CD20 antibody;
[1219] testing a sample from a patient to determine that the cancer expresses ICOS ligand;
[1220] selecting the patient for treatment with the anti-ICOS antibody; and
[1221] administering the anti-ICOS antibody to the patient.
   Sentence 78. Anti-ICOS antibody for use or a method according to any of sentences 74 to 76, wherein the method comprises administering an anti-ICOS antibody to a patient whose cancer was not responsive to prior treatment with anti-CD20 antibody.
   Sentence 79. Anti-ICOS antibody for use or a method according to any of sentences 52 to 78, wherein the cancer is a solid tumour.
   Sentence 80. Anti-ICOS antibody for use or a method according to any of sentences 52 to 78, wherein the cancer is a haemotological liquid tumour.
   Sentence 81. Anti-ICOS antibody for use or a method according to sentence 79 or 80, wherein the tumour is high in regulatory T-cells.
   Sentence 82. Anti-ICOS antibody for use or a method according to any of sentences 43 to 81, wherein the anti-ICOS antibody is as defined in any of sentences 1 to 25 or is provided in a composition according to sentence 26.
   Sentence 83. A transgenic non-human mammal having a genome comprising a human or humanised immunoglobulin locus encoding human variable region gene segments, wherein the mammal does not express ICOS.
   Sentence 84. A method of producing an antibody that binds the extracellular domain of human and non-human ICOS, comprising
[1222] (a) immunising a mammal according to sentence 83 with human ICOS antigen;
[1223] (b) isolating antibodies generated by the mammal;
[1224] (c) testing the antibodies for ability to bind human ICOS and non-human ICOS; and
[1225] (d) selecting one or more antibodies that binds both human and non-human ICOS.
   Sentence 85. A method according to sentence 84, comprising immunising the mammal with cells expressing human ICOS.
   Sentence 86. A method according to sentence 84 or sentence 85, comprising
[1226] (c) testing the antibodies for ability to bind human ICOS and non-human ICOS using surface plasmon resonance and determining binding affinities; and
[1227] (d) selecting one or more antibodies for which the KD of binding to human ICOS is less than 50 nM and the KD of binding to non-human ICOS is less than 500 nM.
   Sentence 87. A method according to sentence 86, comprising
[1228] (d) selecting one or more antibodies for which the KD of binding to human ICOS is less than 10 nM and the KD of binding to non-human ICOS is less than 100 nM.
   Sentence 88. A method according to any of sentences 84 to 87, comprising
[1229] (c) testing the antibodies for ability to bind human ICOS and non-human ICOS using surface plasmon resonance and determining binding affinities; and
[1230] (d) selecting one or more antibodies for which the KD of binding to human ICOS is within 10-fold of the KD of binding to non-human ICOS.
   Sentence 89. A method according to sentence 88, comprising
[1231] (d) selecting one or more antibodies for which the KD of binding to human ICOS is within 5-fold of the KD of binding to non-human ICOS.
   Sentence 90. A method according to any of sentences 84 to 89, comprising testing the antibodies for ability to bind non-human ICOS from the same species as the mammal.
   Sentence 91. A method according to any of sentences 84 to 90, comprising testing the antibodies for ability to bind non-human ICOS from a different species as the mammal.
   Sentence 92. A method according to any of sentences 84 to 91, wherein the mammal is a mouse or a rat.
   Sentence 93. A method according to any of sentences 84 to 92, wherein the non-human ICOS is mouse ICOS or rat ICOS.
   Sentence 94. A method according to any of sentences 84 to 93, wherein the human or humanised immunoglobulin locus comprises human variable region gene segments upstream of an endogenous constant region.
   Sentence 95. A method according to sentence 94, comprising
   (a) immunising a mammal according to sentence 83 with human ICOS antigen, wherein the mammal is a mouse;
   (b) isolating antibodies generated by the mouse;
   (c) testing the antibodies for ability to bind human ICOS and mouse ICOS; and
   (d) selecting one or more antibodies that binds both human and mouse ICOS.
   Sentence 96. A method according to any of sentences 84 to 95, comprising isolating nucleic acid encoding an antibody heavy chain variable domain and/or an antibody light chain variable domain.
   Sentence 97. A method according to any of sentences 84 to 96, wherein the mammal generates antibodies through recombination of human variable region gene segments and an endogenous constant region.
   Sentence 98. A method according to sentence 96 or sentence 97, comprising conjugating the nucleic acid encoding the heavy and/or light chain variable domain to a nucleotide sequence encoding a human heavy chain constant region and/or human light chain constant region respectively.
   Sentence 99. A method according to any of sentences 96 to 98, comprising introducing the nucleic acid into a host cell.
   Sentence 100. A method according to sentence 99, comprising culturing the host cell under conditions for expression of the antibody, or of the antibody heavy and/or light chain variable domain.
   Sentence 101. An antibody, or antibody heavy and/or light chain variable domain, produced by the method according to any of sentences 84 to 100.
   Sentence 102. A method of selecting an antibody that binds ICOS, optionally for selecting an ICOS agonist antibody, the assay comprising:
[1232] providing an array of antibodies immobilised (attached or adhered) to a substrate in a test well;
[1233] adding ICOS-expressing cells (e.g., activated primary T-cells, or MJ cells) to the test well;
[1234] observing morphology of the cells;
[1235] detecting shape change in the cells from rounded to flattened against the substrate within the well; wherein the shape change indicates that the antibody is an antibody that binds ICOS, optionally an ICOS agonist antibody;
[1236] selecting the antibody from the test well;
   expressing nucleic acid encoding the CDRs of the selected antibody; and
   formulating the antibody into a composition comprising one or more additional components.

[1237] Alternative sentences describing anti-ICOS antibodies are described below:

Sentence 1a. An antibody or a fragment thereof which specifically binds to human ICOS (hICOS) (SEQ ID NO: 508, 507 and/or 506), and:
[1238] a) competes for binding to said hICOS with the antibody STIM001, wherein the antibody or fragment comprises a V_{H} domain which comprises the CDRH3 sequence of SEQ ID NO:365, or the CDRH3 sequence of SEQ ID NO:365 comprising 3, 2 or 1 amino acid substitution(s);
[1239] b) competes for binding to said hICOS with the antibody STIM002, wherein the antibody or fragment comprises a V_{H} domain which comprises the CDRH3 sequence of SEQ ID NO:379, or the CDRH3 sequence of SEQ ID NO:379 comprising 3, 2 or 1 amino acid substitution(s);
[1240] c) competes for binding to said hICOS with the antibody STIM002-B, wherein the antibody or fragment comprises a V_{H} domain which comprises the CDRH3 sequence of SEQ ID NO:393, or the CDRH3 sequence of SEQ ID NO:393 comprising 3, 2 or 1 amino acid substitution(s);
[1241] d) competes for binding to said hICOS with the antibody STIM003, wherein the antibody or fragment comprises a V_{H} domain which comprises the CDRH3 sequence of SEQ ID NO:407, or the CDRH3 sequence of SEQ ID NO:407 comprising 3, 2 or 1 amino acid substitution(s);
[1242] e) competes for binding to said hICOS with the antibody STIM004, wherein the antibody or fragment comprises a V_{H} domain which comprises the CDRH3 sequence of SEQ ID NO:421, or the CDRH3 sequence of SEQ ID NO:421 comprising 3, 2 or 1 amino acid substitution(s);
[1243] f) competes for binding to said hICOS with the antibody STIM005, wherein the antibody or fragment comprises a V_{H} domain which comprises the CDRH3 sequence of SEQ ID NO:437, or the CDRH3 sequence of SEQ ID NO:437 comprising 3, 2 or 1 amino acid substitution(s);
[1244] g) competes for binding to said hICOS with the antibody STIM006, wherein the antibody or fragment comprises a V_{H} domain which comprises the CDRH3 sequence of SEQ ID NO:451, or the CDRH3 sequence of SEQ ID NO:451 comprising 3, 2 or 1 amino acid substitution(s);
[1245] h) competes for binding to said hICOS with the antibody STIM007, wherein the antibody or fragment comprises a V_{H} domain which comprises the CDRH3 sequence of SEQ ID NO:465, or the CDRH3 sequence of SEQ ID NO:465 comprising 3, 2 or 1 amino acid substitution(s);
[1246] i) competes for binding to said hICOS with the antibody STIM008, wherein the antibody or fragment comprises a V_{H} domain which comprises the CDRH3 sequence of SEQ ID NO:479, or the CDRH3 sequence of SEQ ID NO:479 comprising 3, 2 or 1 amino acid substitution(s); or
[1247] j) competes for binding to said hICOS with the antibody STIM009, wherein the antibody or fragment comprises a V_{H} domain which comprises the CDRH3 sequence of SEQ ID NO:493, or the CDRH3 sequence of SEQ ID NO:493 comprising 3, 2 or 1 amino acid substitution(s).
   Sentence 2a. The antibody or a fragment thereof according to sentence 1a, wherein the V_{H} domain comprises the CDRH1 sequence of:
[1248] a) SEQ ID NO:363, or the CDRH1 sequence of SEQ ID NO:363 comprising 1 amino acid substitution;
[1249] b) SEQ ID NO:377, or the CDRH1 sequence of SEQ ID NO:377 comprising 1 amino acid substitution;
[1250] c) SEQ ID NO:391, or the CDRH1 sequence of SEQ ID NO:391 comprising 1 amino acid substitution;
[1251] d) SEQ ID NO:405, or the CDRH1 sequence of SEQ ID NO:405 comprising 1 amino acid substitution;
[1252] e) SEQ ID NO:419, or the CDRH1 sequence of SEQ ID NO:419 comprising 1 amino acid substitution;
[1253] f) SEQ ID NO:435, or the CDRH1 sequence of SEQ ID NO:435 comprising 1 amino acid substitution;
[1254] g) SEQ ID NO:449, or the CDRH1 sequence of SEQ ID NO:449 comprising 1 amino acid substitution;
[1255] h) SEQ ID NO:463, or the CDRH1 sequence of SEQ ID NO:463 comprising 1 amino acid substitution; or
[1256] i) SEQ ID NO:477, or the CDRH1 sequence of SEQ ID NO:477 comprising 1 amino acid substitution.
[1257] j) SEQ ID NO:491, or the CDRH1 sequence of SEQ ID NO:491 comprising 1 amino acid substitution.
   Sentence 3a. The antibody or a fragment thereof according to sentence 1a or sentence 2a, wherein the V_{H} domain comprises the CDRH2 sequence of:
[1258] a) SEQ ID NO:364, or the CDRH2 sequence of SEQ ID NO:364 comprising 2 or 1 amino acid substitution(s);
[1259] b) SEQ ID NO:378, or the CDRH2 sequence of SEQ ID NO:378 comprising 2 or 1 amino acid substitution(s);
[1260] c) SEQ ID NO:392, or the CDRH2 sequence of SEQ ID NO:392 comprising 2 or 1 amino acid substitution(s);
[1261] d) SEQ ID NO:406, or the CDRH2 sequence of SEQ ID NO:406 comprising 2 or 1 amino acid substitution(s);
[1262] e) SEQ ID NO:420, or the CDRH2 sequence of SEQ ID NO:420 comprising 2 or 1 amino acid substitution(s);
[1263] f) SEQ ID NO:436, or the CDRH2 sequence of SEQ ID NO:436 comprising 2 or 1 amino acid substitution(s);
[1264] g) SEQ ID NO:450, or the CDRH2 sequence of SEQ ID NO:450 comprising 2 or 1 amino acid substitution(s);
[1265] h) SEQ ID NO:464, or the CDRH2 sequence of SEQ ID NO:464 comprising 2 or 1 amino acid substitution(s);
[1266] i) SEQ ID NO:478, or the CDRH2 sequence of SEQ ID NO:478 comprising 2 or 1 amino acid substitution(s); or
[1267] j) SEQ ID NO:492, or the CDRH2 sequence of SEQ ID NO:492 comprising 2 or 1 amino acid substitution(s).
   Sentence 4a. The antibody or a fragment thereof according to any preceding sentence, wherein the V_{H} domain comprises:
[1268] a) an amino acid sequence of SEQ ID NO:366, or a heavy chain variable domain amino acid sequence that is at least 98% identical to SEQ ID NO:366;
[1269] b) an amino acid sequence of SEQ ID NO:380, or a heavy chain variable domain amino acid sequence that is at least 98% identical to SEQ ID NO:380;
[1270] c) an amino acid sequence of SEQ ID NO:394, or a heavy chain variable domain amino acid sequence that is at least 98% identical to SEQ ID NO:394;
[1271] d) an amino acid sequence of SEQ ID NO:408, or a heavy chain variable domain amino acid sequence that is at least 98% identical to SEQ ID NO:408;
[1272] e) an amino acid sequence of SEQ ID NO:422, or a heavy chain variable domain amino acid sequence that is at least 98% identical to SEQ ID NO:422;
[1273] f) an amino acid sequence of SEQ ID NO:438, or a heavy chain variable domain amino acid sequence that is at least 98% identical to SEQ ID NO:438;
[1274] g) an amino acid sequence of SEQ ID NO:452, or a heavy chain variable domain amino acid sequence that is at least 98% identical to SEQ ID NO:452;
[1275] h) an amino acid sequence of SEQ ID NO:466, or a heavy chain variable domain amino acid sequence that is at least 98% identical to SEQ ID NO:466;
[1276] i) an amino acid sequence of SEQ ID NO:480, or a heavy chain variable domain amino acid sequence that is at least 98% identical to SEQ ID NO:480; or
[1277] j) an amino acid sequence of SEQ ID NO:494, or a heavy chain variable domain amino acid sequence that is at least 98% identical to SEQ ID NO:494.
   Sentence 5a. The antibody or fragment according to any preceding sentence comprising first and second copies of said V_{H} domain.
   Sentence 6a. The antibody or a fragment thereof according to any preceding sentence comprising a V_{L} domain, which comprises the CDRL1 sequence of:
[1278] a) SEQ ID NO:370, or the CDRL1 sequence of SEQ ID NO:370 comprising one amino acid substitution;
[1279] b) SEQ ID NO:384, or the CDRL1 sequence of SEQ ID NO:384 comprising one amino acid substitution;
[1280] c) SEQ ID NO:398, or the CDRL1 sequence of SEQ ID NO:398 comprising one amino acid substitution;
[1281] d) SEQ ID NO:412, or the CDRL1 sequence of SEQ ID NO:412 comprising one amino acid substitution;
[1282] e) SEQ ID NO:426, or the CDRL1 sequence of SEQ ID NO:426 comprising one amino acid substitution;
[1283] f) SEQ ID NO:442, or the CDRL1 sequence of SEQ ID NO:442 comprising one amino acid substitution;
[1284] g) SEQ ID NO:456, or the CDRL1 sequence of SEQ ID NO:456 comprising one amino acid substitution;
[1285] h) SEQ ID NO:470, or the CDRL1 sequence of SEQ ID NO:470 comprising one amino acid substitution; or
[1286] i) SEQ ID NO:484, or the CDRL1 sequence of SEQ ID NO:484 comprising one amino acid substitution.
[1287] j) SEQ ID NO:498, or the CDRL1 sequence of SEQ ID NO:498 comprising one amino acid substitution.
   Sentence 7a. The antibody or a fragment thereof according to any preceding sentence comprising a or said V_{L} domain, which V_{L} domain comprises the CDRL2 sequence of:
[1288] a) SEQ ID NO:371, or the CDRL2 sequence of SEQ ID NO:371 comprising 1 amino acid substitution;
[1289] b) SEQ ID NO:385, or the CDRL2 sequence of SEQ ID NO:385 comprising 1 amino acid substitution;
[1290] c) SEQ ID NO:399, or the CDRL2 sequence of SEQ ID NO:399 comprising 1 amino acid substitution;
[1291] d) SEQ ID NO:413, or the CDRL2 sequence of SEQ ID NO:413 comprising 1 amino acid substitution;
[1292] e) SEQ ID NO:427, or the CDRL2 sequence of SEQ ID NO:427 comprising 1 amino acid substitution;
[1293] f) SEQ ID NO:443, or the CDRL2 sequence of SEQ ID NO:443 comprising 1 amino acid substitution;
[1294] g) SEQ ID NO:457, or the CDRL2 sequence of SEQ ID NO:457 comprising 1 amino acid substitution;
[1295] h) SEQ ID NO:471, or the CDRL2 sequence of SEQ ID NO:471 comprising 1 amino acid substitution;
[1296] i) SEQ ID NO:485, or the CDRL2 sequence of SEQ ID NO:485 comprising 1 amino acid substitution; or
[1297] j) SEQ ID NO:499, or the CDRL2 sequence of SEQ ID NO:499 comprising 1 amino acid substitution.
   Sentence 8a. The antibody or a fragment thereof according to any preceding sentence comprising a or said V_{L} domain, which V_{L} domain comprises the CDRL3 sequence of:
[1298] a) SEQ ID NO:372, or the CDRL3 sequence of SEQ ID NO:372 comprising 2 or 1 amino acid substitution(s);
[1299] b) SEQ ID NO:386, or the CDRL3 sequence of SEQ ID NO:386 comprising 2 or 1 amino acid substitution(s);
[1300] c) SEQ ID NO:400, or the CDRL3 sequence of SEQ ID NO:400 comprising 2 or 1 amino acid substitution(s);
[1301] d) SEQ ID NO:414, or the CDRL3 sequence of SEQ ID NO:414 comprising 2 or 1 amino acid substitution(s);
[1302] e) SEQ ID NO:428, or the CDRL3 sequence of SEQ ID NO:428 comprising 2 or 1 amino acid substitution(s);
[1303] f) SEQ ID NO:444, or the CDRL3 sequence of SEQ ID NO:444 comprising 2 or 1 amino acid substitution(s);
[1304] g) SEQ ID NO:458, or the CDRL3 sequence of SEQ ID NO:458 comprising 2 or 1 amino acid substitution(s);
[1305] h) SEQ ID NO:472, or the CDRL3 sequence of SEQ ID NO:472 comprising 2 or 1 amino acid substitution(s);
[1306] i) SEQ ID NO:486, or the CDRL3 sequence of SEQ ID NO:486 comprising 2 or 1 amino acid substitution(s); or
[1307] j) SEQ ID NO:500, or the CDRL3 sequence of SEQ ID NO:500 comprising 2 or 1 amino acid substitution(s).
   Sentence 9a. The antibody or a fragment thereof according to any preceding sentence, comprising a or said V_{L} domain, wherein the V_{L} domain comprises an amino acid sequence of:
[1308] a) SEQ ID NO:373, or a light chain variable domain amino acid sequence that is at least 98% identical to SEQ ID NO:373;
[1309] b) SEQ ID NO:387, or a light chain variable domain amino acid sequence that is at least 98% identical to SEQ ID NO:387;
[1310] c) SEQ ID NO:401, or a light chain variable domain amino acid sequence that is at least 98% identical to SEQ ID NO:401;
[1311] d) SEQ ID NO:415, or a light chain variable domain amino acid sequence that is at least 98% identical to SEQ ID NO:415;
[1312] e) SEQ ID NO:429, or a light chain variable domain amino acid sequence that is at least 98% identical to SEQ ID NO:429;
[1313] f) SEQ ID NO:445, or a light chain variable domain amino acid sequence that is at least 98% identical to SEQ ID NO:445;
[1314] g) SEQ ID NO:459, or a light chain variable domain amino acid sequence that is at least 98% identical to SEQ ID NO:459;
[1315] h) SEQ ID NO:473, or a light chain variable domain amino acid sequence that is at least 98% identical to SEQ ID NO:473;
[1316] i) SEQ ID NO:487, or a light chain variable domain amino acid sequence that is at least 98% identical to SEQ ID NO:487; or
[1317] j) SEQ ID NO:501, or a light chain variable domain amino acid sequence that is at least 98% identical to SEQ ID NO:501.
   Sentence 10a. The antibody or fragment according to any one of sentences 6a to 9a, comprising first and second copies of the a or said V_{L} domain.
   Sentence 11. The antibody or fragment according to any preceding sentence, wherein the amino acid substitutions are conservative amino acid substitutions, optionally wherein the conservative substitutions are from one of six groups (each group containing amino acids that are conservative substitutions for one another) selected from:
[1318] 1) Alanine (A), Serine (S), Threonine (T);
[1319] 2) Aspartic acid (D), Glutamic acid (E);
[1320] 3) Asparagine (N), Glutamine (Q);
[1321] 4) Arginine (R), Lysine (K);
[1322] 5) Isoleucine (I), Leucine (L), Methionine (M), Valine (V); and
[1323] 6) Phenylalanine (F), Tyrosine (Y), Tryptophan (W).
   Sentence 12a. An antibody or fragment thereof which specifically binds to an epitope that is:
[1324] a) Identical to an epitope to which the antibody STIM001 specifically binds;
[1325] b) Identical to an epitope to which the antibody STIM002 specifically binds;
[1326] c) Identical to an epitope to which the antibody STIM002-B specifically binds;
[1327] d) Identical to an epitope to which the antibody STIM003 specifically binds;
[1328] e) Identical to an epitope to which the antibody STIM004 specifically binds;
[1329] f) Identical to an epitope to which the antibody STIM005 specifically binds;
[1330] g) Identical to an epitope to which the antibody STIM006 specifically binds;
[1331] h) Identical to an epitope to which the antibody STIM007 specifically binds;
[1332] i) Identical to an epitope to which the antibody STIM008 specifically binds; or
[1333] j) Identical to an epitope to which the antibody STIM009 specifically binds.
   Sentence 13a. The antibody or fragment according to sentence 12a, wherein the epitope is identified by unrelated amino acid scanning, or by X-ray crystallography.
   Sentence 14a. The antibody or fragment according to sentence 13a, wherein the contact residues of the epitope are defined by a reduction in affinity of at least 10-fold in an unrelated amino acid scan, e.g. an alanine scan as determined by SPR.
   Sentence 15a. An antibody or fragment thereof which:
[1334] a) Competes for binding to hICOS with the antibody STIM001;
[1335] b) Competes for binding to hICOS with the antibody STIM002;
[1336] c) Competes for binding to hICOS with the antibody STIM002-B;
[1337] d) Competes for binding to hICOS with the antibody STIM003;
[1338] e) Competes for binding to hICOS with the antibody STIM004;
[1339] f) Competes for binding to hICOS with the antibody STIM005;
[1340] g) Competes for binding to hICOS with the antibody STIM006;
[1341] h) Competes for binding to hICOS with the antibody STIM007;
[1342] i) Competes for binding to hICOS with the antibody STIM008; or
[1343] j) Competes for binding to hICOS with the antibody STIM009.
   Sentence 16a. The antibody or fragment according to any preceding sentence which specifically binds to cynomolgus ICOS (Seq ID No:513, Seq ID NO: 513 or Seq ID No: 514) and/or mouse ICOS (Seq ID No:510, Seq ID No:511 or Seq ID No:512).
   Sentence 17a. The antibody or fragment according to any preceding sentence which specifically binds to a hICOS isoform or natural variant, a mouse ICOS isoform or natural variant and/or a cynomolgus ICOS isoform or natural variant.
   Sentence 18a. The antibody or fragment according to sentence 17a, wherein the hICOS isoform comprises an amino acid sequence as defined by Seq ID no:509.
   Sentence 19a. The antibody or fragment according to any preceding sentence, wherein the antibody or fragment comprises a constant region, such as a human constant region, for example an effector-null human constant region, e.g. an IgG4 constant region or an IgG1 constant region, optionally wherein the constant region is IgG4-PE (Seq ID No:199), or a disabled IgG1 (Seq ID No:205).
   Sentence 20a. The antibody or fragment according to sentence 19a, wherein the constant region is a murine constant region.
   Sentence 21a. The antibody or fragment according to sentence 19a or sentence 20a, wherein the constant region has CDC and/or ADCC activity.

### 5. Anti-ICOS Bispecific Antibodies

[1344] As previously described, the PD-L1 antibodies as provided herein, may be formatted as a multispecific (e.g. bispecific) antibody, as disclosed hereinabove in concepts 37 to 40. In one embodiment disclosed therein, the PD-L1 antibodies as disclosed herein may be formatted in a bispecific antibody which has specificity for both PD-L1 (e.g. human PD-L1) and for ICOS (e.g. an agonist to ICOS, such as human ICOS).

[1345] Thus, there is provided a multispecific (e.g. bispecific antibody or a dual-binding antibody) which has specificity for PD-L1 (e.g. human PD-L1) and ICOS (e.g. human ICOS). In one embodiment the multispecific (e.g. bispecific or dual-binding) antibody has agonistic activity against ICOS (e.g. human ICOS).

[1346] Various ICOS-containing mutispecific antibodies are described in the arrangments below:

Arrangement 1. A multispecific antibody (e.g. bispecific antibody or a dual-binding antibody) which binds (and optionally has specificity for) ICOS (e.g. human ICOS) and another target antigen.

[1347] In one embodiment, there is provided a bispecific antibody or a dual-binding antibody which binds ICOS (e.g. human ICOS) and another target antigen. In one embodiment, there is provided a bispecific antibody or a dual-binding antibody which has specificity for ICOS (e.g. human ICOS) and another target antigen. In one embodiment, there is provided a bispecific antibody antibody which binds ICOS (e.g. human ICOS) and another target antigen, and wherein the bispecific antibody format is a mAb². In one embodiment, there is provided a bispecific antibody antibody which binds ICOS (e.g. human ICOS) and another target antigen, and wherein the bispecific antibody format is a mAb², and the binding to another target antigen is provided by a modified constant region (i.e. an Fcab). In one embodiment, there is provided a bispecific antibody antibody which binds ICOS (e.g. human ICOS) and another target antigen which is PD-L1 (e.g. human PD-L1), and wherein the bispecific antibody format is a mAb2, and the binding to ICOS is provided by a modified constant region (i.e. an Fcab). In one embodiment, there is provided a bispecific antibody antibody which binds ICOS (e.g. human ICOS) and another target antigen which is PD-L1 (e.g. human PD-L1), and wherein the bispecific antibody format is a mAb2, and the binding to ICOS is provided by a modified constant region (i.e. an Fcab) and the binding to PD-L1 is provided by any of the antibodies described in concepts 1 to 70, or by any of the PD-L1 antibodies described in arrangement 5 or 5a below. In one embodiment, there is provided a bispecific antibody antibody which binds ICOS (e.g. human ICOS) and another target antigen which is PD-L1 (e.g. human PD-L1), and wherein the bispecific antibody format is a mAb², and the binding to PD-L1 is provided by a modified constant region (i.e. an Fcab). In one embodiment, there is provided a bispecific antibody antibody which binds ICOS (e.g. human ICOS) and another target antigen which is PD-L1 (e.g. human PD-L1), and wherein the bispecific antibody format is a mAb², and the binding to PD-L1 is provided by a modified constant region (i.e. an Fcab) and the binding to ICOS is provided by any of the antibodies described in sentences 1 to 102 or sentences 1a to 21a.

[1348] In one embodiment, the multispecific (e.g. bispecific or dual-binding) antibody has agonistic activity against ICOS (e.g. human ICOS). The another target antigen may be any of the target antigens specified in concept 39. In one embodiment, the another target antigen is an immune checkpoint inhibitor, such as PD-1, PD-L1, CTLA-4, TIGIT, TIM-3, LAG-3 and VISTA, e.g. PD-L1, TIGIT, CTLA-4, TIM-3 and LAG-3. In one embodiment, the another target antigen is an immune modulator, such as BTLA, hHVEM, CSF1R, CCR4, CD39, CD40, CD73, CD96, CXCR2, CXCR4, CD200, GARP, SIRPα, CXCL9, CXCL10 and CD155, e.g. GARP, SIRPα, CXCR4, BTLA, hVEM and CSF1R. In one embodiment, the another target antigen is an immune activator, such as CD137, GITR, OX40, CD40, CXCR3 (e.g. agonistic anti-CXCR3 antibodies), CD27 and CD3, or CD137, GITR, OX40, CD40, CXCR3 (e.g. agonistic anti-CXCR3 antibodies) and CD3, for example CD137, GITR and OX40). In one embodiment, the another target antigen is PD-L1. In one embodiment, the another target antigen is CTLA-4. In one embodiment, the another target antigen is TIGIT. In one embodiment, the another target antigen is TIM-3. In one embodiment, the another target antigen is LAG-3. In one embodiment, the another target antigen is GITR. In one embodiment, the another target antigen is VISTA. In one embodiment, the another target antigen is CD137. In one embodiment, the another target antigen is SIRPα. In one embodiment, the another target antigen is CXCL10. In one embodiment, the another target antigen is CD155. In one embodiment, the another target antigen is CD40. The antibodies against these another target antigens may be any of those described in aspect 1a hereinabove.

[1349] The format of the multispecific, bispecific or dual-binding antibody may be any of the formats disclosed herein, for example as set out in concepts 37 to 40. In particular, the binding and/or specificity for ICOS may be provided by a non-immunoglobulin format, for example, a T-cell receptor binding domain; an immunoglobulin superfamily domain; an agnathan variable lymphocyte receptor; a fibronectin domain (e.g., an Adnectin™); an antibody constant domain (e.g., a CH3 domain, e.g., a CH2 and/or CH3 of an Fcab™) wherein the constant domain is not a functional CH1 domain; an scFv; an (scFv)2; an sc-diabody; an scFab; a centyrin and an epitope binding domain derived from a scaffold selected from CTLA-4 (Evibody™); a lipocalin domain; Protein A such as Z-domain of Protein A (e.g., an Affibody™ or SpA); an A-domain (e.g., an Avimer™ or Maxibodyn; a heat shock protein (such as and epitope binding domain derived from GroEI and GroES); a transferrin domain (e.g., a trans-body); ankyrin repeat protein (e.g., a DARPin™); peptide aptamer; C-type lectin domain (e.g., Tetranectin™); human γ-crystallin or human ubiquitin (an affilin); a PDZ domain; scorpion toxin; and a kunitz type domain of a human protease inhibitor. The binding and/or specificity for another target antigen may be provided by an immunoglobulin-dervied antigen-binding protein.

[1350] “Specificially binds” has the meaning provided hereinabove. Binding constants, e.g. K_{D} may be determined as described elsewhere herein, and particular K_{D}s of interest are described in arrangment 2 below, and in concept 1 hereinabove (although specified for PD-L1 binding, the values of K_{D} may be equally applied to anti-ICOS binding).

Arrangement 2. A multispecific antibody according to arrangement 1, wherein the ICOS is human ICOS.

[1351] Sequences of human ICOS are provided in Seq ID Nos:506, 507 and 508. In one embodiment, the multispecific antibody is specific for wild type human ICOS. In another embodiment, the multispecific antibody is cross-reactive to an isoform or natural variant of hICOS, for example the isoform of Seq ID No:509. Other isoforms and natural variants are well known to those skilled in the art. In another embodiment, the multispecific antibody is specific for the isoform or natural variant (e.g. the ICOS isoform having the amino acid sequence of Seq ID No:509) over wild type hICOS.

[1352] One way to quantify the extent of species cross-reactivity of an antibody, e.g. a multispecific, bispecific or dual-binding antibody is as the fold-difference in its affinity for antigen compared with a different antigen (e.g. fold difference in affinity for human ICOS vs mouse ICOS or fold difference in affinity for wild-type hICOS vs an isoform of hICOS). Affinity may be quantified as K_{D}, referring to the equilibrium dissociation constant of the antibody-antigen reaction as determined by SPR (optionally with the antibody in Fab format as described elsewhere herein). A species or isoform cross-reactive anti-ICOS antibody may have a fold-difference in affinity for binding human and mouse ICOS that is 30-fold or less, 25-fold or less, 20-fold or less, 15-fold or less, 10-fold or less or 5-fold or less. To put it another way, the K_{D} of binding the extracellular domain of hICOS may be within 30-fold, 25-fold, 20-fold, 15-fold, 10-fold or 5-fold of the K_{D} of binding the extracellular domain of mouse ICOS. Antibodies can also be considered cross-reactive if the K_{D} for binding antigen of both species meets a threshold value, e.g., if the K_{D} of binding hICOS and the K_{D} of binding mouse ICOS are both 10 mM or less, preferably 5 mM or less, more preferably 1 mM or less. The K_{D} may be 10 nM or less, 5 nM or less, 2 nM or less, or 1 nM or less. The K_{D} may be 0.9 nM or less, 0.8 nM or less, 0.7 nM or less, 0.6 nM or less, 0.5 nM or less, 0.4 nM or less, 0.3 nM or less, 0.2 nM or less, or 0.1 nM or less.

[1353] An alternative measure of cross-reactivity for binding hICOS and mouse ICOS, or WT hICOS and an isoform of hICOS is the ability of an antibody to neutralise ICOS ligand binding to ICOS receptor, such as in an HTRF assay (as described elsewhere herein). Examples of species cross-reactive antibodies are provided herein, including STIM001, STIM002, STIM002-B, STIM003, STIM005 and STIM006, each of which was confirmed as neutralising binding of human B7-H2 (ICOS ligand) to hICOS and neutralising binding of mouse B7-H2 to mouse ICOS in an HTRF assay. Any of these antibodies or their variants may be selected when an antibody cross-reactive for human and mouse ICOS is desired. A species cross-reactive anti-ICOS antibody may have an IC₅₀ for inhibiting binding of hICOS to human ICOS receptor that is within 25-fold, 20-fold, 15-fold, 10-fold or 5-fold of the IC₅₀ for inhibiting mouse ICOS to mouse ICOS receptor as determined in an HTRF assay. Antibodies can also be considered cross-reactive if the IC₅₀ for inhibiting binding of hICOS to human ICOS receptor and the IC₅₀ for inhibiting binding of mouse ICOS to mouse ICOS receptor are both 1 mM or less, preferably 0.5 mM or less, e.g., 30 nM or less, 20 nM or less, 10 nM or less. The IC₅₀s may be 5 nM or less, 4 nM or less, 3 nM or less or 2 nM or less. In some cases, the IC₅₀s will be at least 0.1 nM, at least 0.5 nM or at least 1 nM.

[1354] Affinities may also be as disclosed in concept 27 hereinabove.

Arrangement 3. A multispecific antibody according to arrangment 2, which comprises a V_{H} domain comprising a CDRH1, a CDRH2 and a CDRH3 which V_{H} domain binds (and optionally has specificity for) hICOS.

[1355] In one embodiment, the multispecific antibody comprises at least one V_{H} domain which binds to hICOS. For example, the multispecific antibody may comprise a single-chain Fv (scFv), single-chain antibody, a single domain antibody or a domain antibody compsiting only the V_{H} region which binds to (and optionally has specificity for) hICOS.

Arrangement 4. A multispecific antibody according to arrangement 2 or arrangement 3, which comprises a V_{L} domain comprising a CDRL1, a CDRL2 and a CDRL3, which V_{L} domain binds (and optionally has specificity for) hICOS.

[1356] In one embodiment, the multispecific antibody comprises at least one V_{L} domain which binds to hICOS. For example, the multispecific antibody may comprise a single-chain Fv (scFv), single-chain antibody, a single domain antibody or a domain antibody compsiting only the V_{L} region which binds to (and optionally has specificity for) hICOS.

[1357] In another embodiment, the multispecific antibody comprises a paired V_{H} and V_{L} domain, including, but not limited to, an intact or full-length antibody, a Fab fragment, a Fab′ fragment, a F(ab′)₂ fragment or a Fv fragment.

Arrangement 5. A multispecific antibody according to arrangement 3 or 4, wherein the V_{H} and/or V_{L} domain is any of V_{H} and/or V_{L} domains:
[1358] a. of the antibody 7F12, 37A10, 35A9, 36E10, 16G10, 37A10S713, 37A10S714, 37A10S715, 37A10S716, 37A10S717, 37A10S718, 16G10S71, 16G10S72, 16G10S73, 16G10S83, 35A9S79, 35A9S710, 35A9S89 or any other antibody described in WO2016/154177 and US2016/0304610;
[1359] b. of the antibody 422.2, H2L5, or any other antibody described in WO2016/120789 and US2016/0215059;
[1360] c. of the antibody 314-8, the antibody produced from hybridoma CNCM 1-4180, or any other antibody described in WO2014/033327 and US2015/0239978;
[1361] d. of the antibody Icos145-1, the antibody produced by hybridoma CNCM 1-4179, or any other antibody described in WO2012/131004, U.S. Pat. No. 9,376,493 and US2016/0264666;
[1362] e. of the antibody JMAb 136, “136”, or any other antibody described in WO2010/056804;
[1363] f. of the antibody MIC-944, 9F3 or any other antibody described in WO99/15553, U.S. Pat. Nos. 7,259,247, 7,132,099, 7,125,551, 7,306,800, 7,722,872, WO05/103086, US8.318.905 and U.S. Pat. No. 8,916,155;
[1364] g. of any JMAb antibody, e.g., any of JMAb-124, JMAb-126, JMAb-127, JMAb-128, JMAb-135, JMAb-136, JMAb-137, JMAb-138, JMAb-139, JMAb-140, JMAb-141, e.g., JMAb136, or any other antibody described in WO98/3821, U.S. Pat. No. 7,932,358B2, US2002/156242, U.S. Pat. Nos. 7,030,225, 7,045,615, 7,279,560, 7,226,909, 7,196,175, 7,932,358, 8,389,690, WO02/070010, U.S. Pat. Nos. 7,438,905, 7,438,905, WO01/87981, U.S. Pat. Nos. 6,803,039, 7,166,283, 7,988,965, WO01/15732, U.S. Pat. Nos. 7,465,445 and 7,998,478;
[1365] h. of the antibody 17G9 or any other antibody described in WO2014/08911;
[1366] i. of any antibody described in WO2012/174338;
[1367] j. of any antibody described in US2016/0145344;
[1368] k. of any antibody described in WO2011/020024, US2016/002336, US2016/024211 and U.S. Pat. No. 8,840,889;
[1369] l. of any antibody described in U.S. Pat. No. 8,497,244;
[1370] m. of the antibody known as GSK3359609;
[1371] n. of the antibody known as JTX-2011; or
[1372] o. of antibody clone ISA-3 (eBioscience), clone SP98 (Novus Biologicals), clone 1 G1, clone 3G4 (Abnova Corporation), clone 669222 (R&D Systems), clone TQ09 (Creative Diagnostics), or clone C398.4A (BioLegend).

[1373] Arrangement 5a. A multispecific antibody according to any preceding arrangement, which comprises the CDRH1, CDRH2, CDR3, CDRL1, CDRL2 and CDRL3, or the V_{H}, or the V_{L} or the V_{H} and V_{L} region:
[1374] a. of the antibody 7F12, 37A10, 35A9, 36E10, 16G10, 37A10S713, 37A10S714, 37A10S715, 37A10S716, 37A10S717, 37A10S718, 16G10S71, 16G10S72, 16G10S73, 16G10S83, 35A9S79, 35A9S710, 35A9S89 or any other antibody described in WO2016/154177 and US2016/0304610;
[1375] b. of the antibody 422.2, H2L5, or any other antibody described in WO2016/120789 and US2016/0215059;
[1376] c. of the antibody 314-8, the antibody produced from hybridoma CNCM 1-4180, or any other antibody described in WO2014/033327 and US2015/0239978;
[1377] d. of the antibody Icos145-1, the antibody produced by hybridoma CNCM 1-4179, or any other antibody described in WO2012/131004, U.S. Pat. No. 9,376,493 and US2016/0264666;
[1378] e. of the antibody JMAb 136, “136”, or any other antibody described in WO2010/056804;
[1379] f. of the antibody MIC-944, 9F3 or any other antibody described in WO99/15553, U.S. Pat. Nos. 7,259,247, 7,132,099, 7,125,551, 7,306,800, 7,722,872, WO05/103086, US8.318.905 and U.S. Pat. No. 8,916,155;
[1380] g. of any JMAb antibody, e.g., any of JMAb-124, JMAb-126, JMAb-127, JMAb-128, JMAb-135, JMAb-136, JMAb-137, JMAb-138, JMAb-139, JMAb-140, JMAb-141, e.g., JMAb136, or any other antibodye described in WO98/3821, U.S. Pat. No. 7,932,358B2, US2002/156242, U.S. Pat. Nos. 7,030,225, 7,045,615, 7,279,560, 7,226,909, 7,196,175, 7,932,358, 8,389,690, WO02/070010, U.S. Pat. Nos. 7,438,905, 7,438,905, WO01/87981, U.S. Pat. Nos. 6,803,039, 7,166,283, 7,988,965, WO01/15732, U.S. Pat. Nos. 7,465,445 and 7,998,478;
[1381] h. of the antibody 17G9 or any other antibody described in WO2014/08911;
[1382] i. of any antibody described in WO2012/174338;
[1383] j. of any antibody described in US2016/0145344;
[1384] k. of any antibody described in WO2011/020024, US2016/002336, US2016/024211 and U.S. Pat. No. 8,840,889;
[1385] l. of any antibody described in U.S. Pat. No. 8,497,244;
[1386] m. of the antibody known as GSK3359609;
[1387] n. of the antibody known as JTX-2011; or
[1388] o. of antibody clone ISA-3 (eBioscience), clone SP98 (Novus Biologicals), clone 1 G1, clone 3G4 (Abnova Corporation), clone 669222 (R&D Systems), clone TQ09 (Creative Diagnostics), or clone C398.4A (BioLegend).
   Arrangement 6. A multispecific antibody according to arrangement 3 or 4, wherein the V_{H} and/or V_{L} domain is any of V_{H} and/or V_{L} domains defined in sentences 1 to 102 or sentences 1a to 21a.

[1389] In one embodiment, the anti-ICOS V_{H} and/or V_{L} is as described in GB patent application 1620414.1 (filed 1 Dec. 2016), the contents of which are incorporated herein by reference.

Arrangement 7. A multispecific antibody according to any preceding arrangement, which has agonistic activity against ICOS.

[1390] Agonism can be tested for in an in vitro T-cell activation assays, using antibody in soluble form (e.g. in immunoglobulin format or other antibody format comprising two spatially separated antigen-binding sites, e.g., two V_{H}-V_{L} pairs), either including or excluding a cross-linking agent, or using antibody (e.g. multispecific antibody) bound to a solid surface to provide a tethered array of antigen-binding sites. Agonism assays may use a hICOS positive T-lymphocyte cell line such as MJ cells (ATCC CRL-8294) as the target T-cell for activation in such assays. One or more measures of T-cell activation can be determined for a test antibody and compared with a reference molecule or a negative control to determine whether there is a statistically significant (p<0.05) difference in T-cell activation effected by the test antibody (e.g. multispecific antibody) compared with the reference molecule or the control. One suitable measure of T-cell activation is production of cytokines, e.g., IFNγ, TNFα or IL-2. A skilled person will include suitable controls as appropriate, standardising assay conditions between test antibody and control. A suitable negative control is an antibody in the same format (e.g., isotype control) that does not bind ICOS, e.g., an antibody (e.g. multispecific antibody) specific for an antigen that is not present in the assay system. A significant difference is observed for test antibody relative to a cognate isotype control within the dynamic range of the assay is indicative that the antibody acts as an agonist of the ICOS receptor in that assay.

[1391] An agonist antibody may be defined as one which, when tested in a T-cell activation assay:

[1392] has a significantly lower EC₅₀ for induction of IFNγ production compared with control antibody;

[1393] induces significantly higher maximal IFNγ production compared with control antibody;

[1394] has a significantly lower EC₅₀ for induction of IFNγ production compared with ICOSL-Fc;

[1395] induces significantly higher maximal IFNγ production compared with ICOSL-Fc;

[1396] has a significantly lower ECK for induction of IFNγ production compared with reference antibody C398.4A; and/or

[1397] induces significantly higher maximal IFNγ production compared with reference antibody C398.4A.

[1398] A significantly lower or significantly higher value may for example be up to 0.5-fold different, up to 0.75-fold different, up to 2-fold different, up to 3-fold different, up to 4-fold different or up to 5-fold different, compared with the reference or control value.

[1399] Thus, in one example, an antibody (e.g. a multispecific antibody) provided herein has a significantly lower, e.g., at least 2-fold lower, ECK for induction of IFNγ in an MJ cell activation assay using the antibody in bead-bound format, compared with control.

[1400] The bead-bound assay uses the antibody (e.g. multispecific antibody) (and, for control or reference experiments, the control antibody, reference antibody or ICOSL-Fc) bound to the surface of beads. Magnetic beads may be used, and various kinds are commercially available, e.g., Tosyl-activated DYNABEADS M-450 (DYNAL Inc, 5 Delaware Drive, Lake Success, N.Y. 11042 Prod No. 140.03, 140.04). Beads may be coated (coating methods are well-known to those skilled in the art), or generally by dissolving the coating material in carbonate buffer (pH 9.6, 0.2 M) or other method known in the art. Use of beads conveniently allows the quantity of protein bound to the bead surface to be determined with a good degree of accuracy. Standard Fc-protein quantification methods can be used for coupled protein quantification on beads. Any suitable method can be used, with reference to a relevant standard within the dynamic range of the assay. DELFIA, ELISA or other methods could be used.

[1401] Agonism activity of an antibody can also be measured in primary human T-lymphocytes ex vivo. The ability of an antibody (e.g. multispecific antibody) to induce expression of IFNγ in such T-cells is indicative of ICOS agonism. Preferably, an antibody will show significant (p<0.05) induction of IFNγ at 5 μg/mL compared with control antibody in a T-cell activation assay. An anti-ICOS antibody may stimulate T-cell activation to a greater degree than ICOS-L or C398.4 in such an assay. Thus, the antibody may show significantly (p<0.05) greater induction of IFNγ at 5 μg/mL compared with the control or reference antibody in a T-cell activation assay. TNFα or IL-2 induction may be measured as an alternative assay readout.

[1402] Agonism of an anti-ICOS antibody may contribute to its ability to change the balance between populations of T_{Reg} and T_{Eff} cells in vivo, e.g., in a site of pathology such as a tumour microenvironment, in favour of T_{Eff} cells. The ability of an antibody to enhance tumour cell killing by activated ICOS-positive effector T-cells may be determined, as discussed elsewhere herein.

Arrangement 8. A multispecific antibody according to any preceding arrangement, which binds (and optionally has specificity for) mouse ICOS and/or cynomolgus ICOS.

[1403] The multispecific antibodies described herein may be cross-reactive, and may for example bind the extracellular domain of mouse ICOS as well as human ICOS. The multispecific antibodies may bind other non-human ICOS, including ICOS of primates, such as cynomolgus monkey. An anti-ICOS multispecific antibody intended for therapeutic use in humans must bind human ICOS, whereas binding to ICOS of other species would not have direct therapeutic relevance in the human clinical context. Regardless of the underlying theory, however, cross-reactive antibodies are of high value and are excellent candidates as therapeutic molecules for pre-clinical and clinical studies. Cross-reactivity may be determined as set out for arrangement 2 hereinabove.

Arrangement 9. A multispecific antibody according to any preceding arrangement which is a bispecific antibody.

[1404] A bispecific antibody has any of the meanings set out hereinabove.

Arrangement 10. A bispecifc antibody according to arrangement 9, wherein the bispecific antibody format is selected from DVD-Ig, mAb², FIT-Ig, mAb-dAb, dock and lock, SEEDbody, scDiabody-Fc, diabody-Fc, tandem scFv-Fc, Fab-scFv-Fc, Fab-scFv, intrabody, BITE, diabody, DART, TandAb, scDiabody, scDiabody-CH3, Diabody-CH3, minibody, knobs-in-holes, knobs-in-holes with common light chain, knobs-in-holes with common light chain and charge pairs, charge pairs, charge pairs with common light chain, in particular mAb², knob-in-holes, knob-in-holes with common light chain, knobs-in-holes with common light chain and charge pairs and FIT-Ig, e.g. mAb² and FIT-Ig.

[1405] In one embodiment, the bispecific antibody format is as described in any of concepts 37 to 40 described hereinabove, or as described in the definitions section. In one embodiment, the bispecific antibody format is a mAb², wherein the ICOS binding is provided by the Fcab portion of the bispecific antibody. In another embodiment, the the bispecific antibody format is a mAb², wherein the ICOS binding is provided by the Fab portion of the bispecific antibody.

[1406] In another embodiment, the bispecific antibody is not a mAb² bispecific antibody.

Arrangement 11. A multispecific antibody according to any one of arrangements 1 to 8 which is a dual binding antibody.

[1407] A dual-binding antibody has any of the meanings set out hereinabove.

Arrangement 12. A multispecific, bispecific or dual binding antibody according to any one of arrangements 1 to 11, wherein the another target antigen is selected from immune checkpoint inhibitors, immune modulators and immune activators.
Arrangement 13. A multispecific, bispecific or dual-binding antibody according to arrangement 12, wherein the another target antigen is selected from PD-1, PD-L1, CTLA-4, TIGIT, TIM-3, LAG-3, VISTA, BTLA, HVEM, CSF1R, CCR4, CD39, CD40, CD73, CD96, CXCR2, CXCR4, CD200, GARP, SIRPα, CXCL9, CXCL10, CD155, CD137, GITR, OX40, CXCR3, CD27 and CD3.

[1408] Arrangement 13a. A multispecific, bispecific or dual-binding antibody according to arrangement 12, wherein the another target antigen is selected from PD-1, PD-L1, CTLA-4, TIGIT, TIM-3, LAG-3, VISTA, BTLA, HVEM, CSF1R, CCR4, CD39, CD40, CD73, CD96, CXCR2, CXCR4, CD200, GARP, SIRPα, CXCL9, CXCL10, CD155, CD137, GITR, OX40, CXCR3 and CD3.

In one embodiment, the antigen-binding site which binds the another target antigen is provided for by any of the CDRH1, CDRH2, CDR3, CDRL1, CDRL2 and CDRL3, or the V_{H}, or the V_{L} or the V_{H} and V_{L} regions from any one of the antibodies against the targets listed in arrangement 13 which are described in more detail in aspect 1a hereinabove.
Arrangement 14. A multispecific, bispecific or dual-binding antibody according to arrangement 13, wherein the another target antigen is selected from PD-L1, TIGIT, TIM-3, LAG-3, GARP, SIRPα, CXCR4, BTLA, HVEM, CSF1R, agonistic anti-CXCR3 antibodies), CD137, GITR and OX40.
Arrangement 15. A multispecific, bispecific or dual-binding antibody according to arrangement 14, wherein the another target antigen is PD-L1 (e.g. human PD-L1).
Arrangement 16. A multispecific, bispecific or dual-binding antibody according to arrangemnet 15, wherein the binding (and optionally specificity for) PD-L1 is provided by any of the antibodies or fragments as defined in concepts 1 to 70.
Arrangement 17. A multispecific, bispecific or dual-binding antibody according to arrangement 15 or arrangement 16, which comprises a V_{H} domain comprising a CDRH1, a CDRH2 and a CDRH3 which V_{H} domain has specificity for human PD-L1.
Arrangemnt 18. A multispecific, bispecific or dual-binding antibody according to any one of arrangements 15 to 17, which comprises a V_{L} domain comprising a CDRL1, a CDRL2 and a CDRL3, which V_{L} domain as specificity for human PD-L1.
Arrangement 19. A multispecific, bispecific or dual-binding antibody according to arrangement 17 or arrangement 18, wherein the V_{H} and/or V_{L} domain is any of V_{H} and/or V_{L} domains from atezolizumab (Roche), avelumab (Merck), BMS-936559 (BMS), durvalumab (Medimmune) or from any of the PD-L1 antibodies disclosed in WO2016/061142, WO2016/022630, WO2016/007235, WO2015/173267, WO2015/181342, WO2015/109124, WO2015/112805, WO2015/061668, WO2014/159562, WO2014/165082, WO2014/100079, WO2014/055897, WO2013/181634, WO2013/173223, WO2013/079174, WO2012/145493, WO2011/066389, WO2010/077634, WO2010/036959 or WO2007/005874.
Arrangement 20. A multispecific, bispecific or dual-binding antibody according to arrangement 17 or arrangement 18, wherein the V_{H} and/or V_{L} domain is any of V_{H} and/or V_{L} domains described in concepts 1 to 70.
Arrangement 21. A multispecific, bispecific or dual-binding antibody according to any one of arrangements 15 to 20, which binds (and optionally has specificity for) mouse PD-L1 and/or cynomolgus PD-L1.

[1409] Cross reactivity may be as described hereinabove for arrangement 2 or concept 27.

Arrangement 22. A composition comprising a multispecific, bispecific or dual-binding antibody as defined in any preceding arrangement and a pharmaceutically acceptable excipient, diluent or carrier and optionally further comprising a further therapeutic agent independently selected from the group consisting of:
[1410] a) other immune checkpoint inhibitors (such as anti-TIM-3 antibodies, anti-PD-1 antibodies, anti-CTLA-4 antibodies, anti-TIGIT antibodies and anti-LAG-3 antibodies);
[1411] b) immune stimulators (such as anti-OX40 antibodies, anti-GITR antibodies, anti-CD137 antibodies, anti-ICOS antibodies and anti-CD40 antibodies);
[1412] c) chemokine receptor antagonists (such as CXCR4, CCR4 and CXCR2);
[1413] d) targeted kinase inhibitors (such as CSF-1R or VEGFR inhibitors);
[1414] e) angiogenesis inhibitors (such as anti-VEGF-A or Delta-like Ligand-4);
[1415] f) immune stimulating peptides or chemokines (such as CXCL9 or CXCL10);
[1416] g) cytokines (such as IL-15 and IL-21);
[1417] h) bispecific T-cell engagers (BiTEs) having at least one specificity against CD3 (e.g. CD3/CD19 BiTE);
[1418] i) other bi-specific molecules (for example IL-15-containing molecules targeted towards tumour associated antigens, for example Epidermal growth factor receptors such as EGFR, Her-2, New York Esophageal Cancer-1 (NY-ESO-1), GD2, EpCAM or Melanoma Associated Antigen-3 (MAGE-A3));
[1419] j) oncolytic viruses (such as HSV virus (optionally which secretes GMCSF), Newcastle disease virus and Vaccinia virus);
[1420] k) vaccination with tumour associated antigens (such as New York Esophageal Cancer-1 [NY-ESO-1], Melanoma Associated Antigen-3 [MAGE-3]);
[1421] l) cell-based therapies (such as chimeric Antigen Receptor-T-cells (CAR-T) for example expressing anti-CD19, anti-EpCam or anti-mesothelin);
[1422] m) bi-specific NK cell engagers having a specificity against an activating MK receptor such as NKG2D or CD16a; and
[1423] n) adoptive transfer of tumour specific T-cells or LAK cells.

[1424] The antibodies may be any of the sequences or antibodies described in arrangement 5 or detailed in aspect 1a. Other features of this arrangement may be as described in concept 49.

[1425] Arrangement 22a. A pharmaceutical composition according to arrangement 22, or a kit comprising a pharmaceutical composition as defined in arrangement 22, wherein the composition is for treating and/or preventing a condition or disease selected from neoplastic or non-neoplastic disease, chronic viral infections, and malignant tumours, such as melanoma, Merkel cell carcinoma, non-small cell lung cancer (squamous and non-squamous), renal cell cancer, bladder cancer, head and neck squamous cell carcinoma, mesothelioma, virally induced cancers (such as cervical cancer and nasopharyngeal cancer), soft tissue sarcomas, haematological malignancies such as Hodgkin's and non-Hodgkin's disease, diffuse large B-cell lymphoma.

[1426] Arrangement 22b. A pharmaceutical composition according to arrangement 22 or arrangement 22a in combination with, or kit according to arrangement 22a comprising, a label or instructions for use to treat and/or prevent said disease or condition in a human; optionally wherein the label or instructions comprise a marketing authorisation number (e.g., an FDA or EMA authorisation number); optionally wherein the kit comprises an IV or injection device that comprises the multispecific, bispecific or dual-binding antibody.

Arrangement 23. A multispecific, bispecific or dual-binding antibody as defined in any one of arrangements 1 to 21 for use in treating or preventing a disease or condition, selected from neurological disease, neoplastic or non-neoplastic disease, chronic viral infections, and malignant tumours; such as melanoma, Merkel cell carcinoma, non-small cell lung cancer (squamous and non-squamous), renal cell cancer, bladder cancer, head and neck squamous cell carcinoma, mesothelioma, virally induced cancers (such as cervical cancer and nasopharyngeal cancer), soft tissue sarcomas, haematological malignancies such as Hodgkin's and non-Hodgkin's disease and diffuse large B-cell lymphoma (for example melanoma, Merkel cell carcinoma, non-small cell lung cancer (squamous and non-squamous), renal cell cancer, bladder cancer, head and neck squamous cell carcinoma and mesothelioma or for example virally induced cancers (such as cervical cancer and nasopharyngeal cancer) and soft tissue sarcomas).
Arrangement 24. Use of a multispecific, bispecific or dual-binding antibody as defined in any one of arrangements 1 to 21 in the manufacture of a medicament for administration to a human for treating or preventing a disease or condition in the human selected from neurological disease, neoplastic or non-neoplastic disease, chronic viral infections, and malignant tumours, such as melanoma, Merkel cell carcinoma, non-small cell lung cancer (squamous and non-squamous), renal cell cancer, bladder cancer, head and neck squamous cell carcinoma, mesothelioma, virally induced cancers (such as cervical cancer and nasopharyngeal cancer), soft tissue sarcomas, haematological malignancies such as Hodgkin's and non-Hodgkin's disease and diffuse large B-cell lymphoma (for example melanoma, Merkel cell carcinoma, non-small cell lung cancer (squamous and non-squamous), renal cell cancer, bladder cancer, head and neck squamous cell carcinoma and mesothelioma or for example virally induced cancers (such as cervical cancer and nasopharyngeal cancer) and soft tissue sarcomas).
Arrangement 25. A method of treating or preventing a disease or condition selected from neurological disease, neoplastic or non-neoplastic disease, chronic viral infections, and malignant tumours, such as melanoma, Merkel cell carcinoma, non-small cell lung cancer (squamous and non-squamous), renal cell cancer, bladder cancer, head and neck squamous cell carcinoma, mesothelioma, virally induced cancers (such as cervical cancer and nasopharyngeal cancer), soft tissue sarcomas, haematological malignancies such as Hodgkin's and non-Hodgkin's disease and diffuse large B-cell lymphoma (for example melanoma, Merkel cell carcinoma, non-small cell lung cancer (squamous and non-squamous), renal cell cancer, bladder cancer, head and neck squamous cell carcinoma and mesothelioma or for example virally induced cancers (such as cervical cancer and nasopharyngeal cancer) and soft tissue sarcomas) in a human, comprising administering to said human a therapeutically effective amount of a multispecific, bispecific or dual-binding antibody as defined in any one of arrangements 1 to 21, wherein the disease or condition is thereby treated or prevented.

[1427] The diseases and conditions which may be treated or prevented by the multispecific, bisecific or dual-binding antibodies provided for in these arrangements may be any of the diseases provided for in, for example concepts 41 to 45, aspects 51 to 55, or in any of the sentences described herein.

Arrangement 26. The multispecific, bispecific or dual-binding antibody according to arrangement 23, the use according to arrangement 24 or the method according to arrangement 25, wherein the neurological disease is a neurodegenerative disease, disorder or condition, optionally wherein the neurodegenerative disease, disorder or condition is selected from Alzheimer's disease, amyotrophic lateral sclerosis, Parkinson's disease, Huntington's disease, primary progressive multiple sclerosis, secondary progressive multiple sclerosis, corticobasal degeneration, Rett syndrome, a retinal degeneration disorder selected from age-related macular degeneration and retinitis pigmentosa; anterior ischemic optic neuropathy, glaucoma, uveitis, depression, trauma-associated stress or post-traumatic stress disorder, frontotemporal dementia, Lewy body dementias, mild cognitive impairments, posterior cortical atrophy, primary progressive aphasia and progressive supranuclear palsy or aged-related dementia, in particular Alzheimer's disease, amyotrophic lateral sclerosis, Parkinson's disease and Huntington's disease, and e.g. Alzheimer's disease.
Arrangement 27. The multispecific, bispecific or dual-binding antibody according to arrangement 23, the use according to arrangement 24 or the method according to arrangement 25, wherein the cancer is selected from melanoma, Merkel cell carcinoma, non-small cell lung cancer (squamous and non-squamous), renal cell cancer, bladder cancer, head and neck squamous cell carcinoma and mesothelioma or is selected from virally induced cancers (such as cervical cancer and nasopharyngeal cancer) and soft tissue sarcomas.
Arrangement 28. The multispecific, bispecific or dual-binding antibody, the use or the method according to any one of arrangements 23 to 27, further comprising administering to the human a further therapy, for example a further therapeutic agent, optionally wherein the further therapeutic agent is independently selected from the group consisting of:
[1428] a. other immune checkpoint inhibitors (such as anti-TIM-3 antibodies, anti-PD-1 antibodies, anti-CTLA-4 antibodies, anti-TIGIT antibodies and anti-LAG-3 antibodies);
[1429] b. immune stimulators (such as anti-OX40 antibodies, anti-GITR antibodies, anti-CD137 antibodies and anti-CD40 antibodies);
[1430] c. chemokine receptor antagonists (such as CXCR4, CCR4 and CXCR2);
[1431] d. targeted kinase inhibitors (such as CSF-1R or VEGFR inhibitors);
[1432] e. angiogenesis inhibitors (such as anti-VEGF-A or Delta-like Ligand-4);
[1433] f. immune stimulating peptides or chemokines (such as CXCL9 or CXCL10);
[1434] g. cytokines (such as IL-15 and IL-21);
[1435] h. bispecific T-cell engagers (BiTEs) having at least one specificity against CD3 (e.g. CD3/CD19 BiTE);
[1436] i. other bi-specific molecules (for example IL-15-containing molecules targeted towards tumour associated antigens, for example Epidermal growth factor receptors such as EGFR, Her-2, New York Esophageal Cancer-1 (NY-ESO-1), GD2, EpCAM or Melanoma Associated Antigen-3 (MAGE-A3));
[1437] j. oncolytic viruses (such as HSV virus (optionally which secretes GMCSF), Newcastle disease virus and Vaccinia virus);
[1438] k. vaccination with tumour associated antigens (such as New York Esophageal Cancer-1 [NY-ESO-1], Melanoma Associated Antigen-3 [MAGE-3]);
[1439] l. cell-based therapies (such as chimeric Antigen Receptor-T-cells (CAR-T) for example expressing anti-CD19, anti-EpCam or anti-mesothelin);
[1440] m. bi-specific NK cell engagers having a specificity against an activating MK receptor such as NKG2D or CD16a; and
[1441] n. adoptive transfer of tumour specific T-cells or LAK cells,

[1442] or optionally wherein the further therapy is chemotherapy, radiotherapy and surgical removal of tumours.

[1443] Radiotherapy may be single dose or in fractionated doses, either delivered to affected tissues directly or to the whole body.

[1444] In this arrangement, any of the features and embodiments of concept 46 apply mutatis mutandis.

[1445] In this aspect, the bispecific molecules include “bispecific antibodies” and antibody fusion proteins, including those formats and molecules described in concepts 37 to 40.

Arrangement 29. A nucleic acid that encodes a heavy chain and/or a light chain of a multispecific, bispecific or dual-binding antibody as defined in any one of arrangements 1 to 21.
Arrangement 30. A vector comprising the nucleic acid as defined in arrangement 29; optionally wherein the vector is a CHO or HEK293 vector.
Arrangement 31. A host comprising the nucleic acid as defined in arrangement 29 or the vector as defined in arrangement 30.

### 6. Uses for Antibodies and Immunocytokines

[1446] Unless otherwise apparent from the context, the uses for antibodies or fragments applies mutatis mutandis to the immunocytokines and multispecific (e.g. bispecific or dual-binding antibodies) of the invention. Where described in the context of PD-L1 or another target that is not TIGIT, the features in this section 6 apply mutatis mutandis to the TIGIT aspects of the invention in place of PD-L1 or such other target.

[1447] Therapeutic

[1448] In one embodiment, the PD-L1 specific antibodies described herein and antigen binding fragments thereof can be used for therapeutic modulation of the PD-1/PD-L1 pathway. In one embodiment, the PD-L1 specific antibody or fragment thereof is as described in any concept, aspect or embodiment herein.

[1449] In one embodiment, the antibody or antibody binding fragment specifically binds to PD-L1 and thereby inhibits PD-L1 activity. In another embodiment, the antibody or antibody binding fragment specifically binds to PD-L1 and thereby inhibits binding of PD-L1 to PD-1. In another embodiment, the antibody or antibody binding fragment specifically binds to PD-L1 and thereby inhibits binding of PD-L1 to B7-1. In yet another embodiment, the antibody or antigen binding fragment thereof blocks PD-L1 induced T-cell suppression and thereby enhance anti-tumour immunity.

[1450] In yet another embodiment, the antibody or antigen binding fragment thereof is capable of stimulating one or more of the following activities: T-cell proliferation, IFN-γ, CD25 and/or IL-2 secretion in mixed lymphocyte reactions.

[1451] In one embodiment, the antibody or antigen binding fragment thereof specifically binds PD-L1 and inhibits PD-L1 induced cell proliferation, for example, tumour cell proliferation and/or inhibits tumour cell survival. In another embodiment, the antibody or antigen binding fragment thereof specifically binds PD-L1 and thereby inhibits PD-L1 mediated suppression of T-cells, including, but not limited to, tumour reactive T-cells, thereby enhancing anti-tumour cytolytic T-cell activity. In other embodiments, the antibodies or binding fragments thereof as described herein inhibit tumour cell adhesion, motility, invasion and cellular metastasis, and reduce tumour growth. In other embodiments, the antibodies or binding fragments thereof can bind to cells expressing PD-L1, including tumour and non-tumour cells, and recruit, by means of interaction with the Fc portion of the antibody, cellular effector functions against the target cells by mechanisms including but not limited to antibody dependent cellular cytotoxicity (ADCC) and antibody dependent cellular phagocytosis (ADCP).

[1452] Still further embodiments include methods of treating a proliferative or invasion-related disease in a mammal by administering to the animal a therapeutically effective dose of an antibody or antigen binding fragment thereof. In another embodiment, the antibodies or antigen binding fragments thereof can be used in a method for treating a mammal suffering from a disease selected from: neoplastic or non-neoplastic disease, chronic viral infection, and a malignant tumour, wherein the method includes administering to the mammal a therapeutically effective dose of an antibody or antigen binding fragment thereof.

[1453] Still further embodiments include methods of treating a disease of immunological dysfunction in a mammal by administering to the animal a therapeutically effective dose of an antibody or antigen binding fragment thereof as described herein. Exemplary immunological dysfunction in humans includes diseases of neurological deficit, such as Alzheimer's disease.

[1454] It has further been proposed that an immune response, particularly an IFNγ-dependent systemic immune response, could be beneficial for treatment of Alzheimer's disease and other CNS pathologies that share a neuroinflammatory component. WO2015/136541 (incorporated herein by reference) proposes treatment of Alzheimer's disease using an anti-PD-1 antibody (also see Baruch K. et al., PD-1 immune checkpoint blockade reduces pathology and improves memory in mouse models of Alzheimer's disease, Nature Medicine, 2016, 22(2):137-137).

[1455] Thus, in one embodiment, the antibody or antigen binding fragment thereof specifically binds PD-L1 and reduces the level of systemic immunosuppression in an individual by release of a restraint imposed on the immune system by PD-1/PD-L1 immune checkpoint pathway. In an aspect, PD-1/PD-L1 inhibitory immune checkpoint pathway blockade results in transient relief the systemic adaptive immune activity from suppression, which results in a transiently augmented immune response in the periphery, mainly manifested by elevation of IFN-γ secretion by IFN-γ-producing cells. Increased IFN-γ activity may enable the brain's choroid plexus to allow selective leukocyte trafficking and infiltration of T-cells and monocytes into the damaged CNS, homing of these immune cells to sites of neurodegenerative pathology and neuroinflammation, and may modulate the environment to become less toxic and more permissive for clearance of toxic agents, rescue of neurons, regeneration and repair.

[1456] Thus, the PD-L1 mediated disease or condition is a neurodegenerative disease, disorder or condition. In one embodiment, the neurodegenerative disease, disorder or condition is Alzheimer's disease. In another embodiment, the neurodegenerative disease, disorder or condition is selected from amyotrophic lateral sclerosis, Parkinson's disease, Huntington's disease, primary progressive multiple sclerosis, secondary progressive multiple sclerosis, corticobasal degeneration, Rett syndrome, a retinal degeneration disorder selected from age-related macular degeneration and retinitis pigmentosa; anterior ischemic optic neuropathy, glaucoma, uveitis, depression, trauma-associated stress or post-traumatic stress disorder, frontotemporal dementia, Lewy body dementias, mild cognitive impairments, posterior cortical atrophy, primary progressive aphasia and progressive supranuclear palsy or aged-related dementia. In another embodiment, the neurodegenerative disease, disorder or condition is selected from Alzheimer's disease, amyotrophic lateral sclerosis, Parkinson's disease and Huntington's disease.

[1457] Anti-PD-L1 antibodies as described herein may be used in the treatment of Alzheimer's disease or other neurodegenerative diseases, optionally in combination with one or more other immune checkpoint inhibitors (such as anti-TIM-3 antibodies, anti-CTLA-4 antibodies, anti-TIGIT antibodies and anti-LAG-3 antibodies) or one or more other immune stimulators (such as anti-OX40 antibodies, anti-GITR antibodies, anti-CD137 antibodies, anti-ICOS antibodies and anti-CD40 antibodies, including those which are specifically described in Aspect 1a herein). Other combination partners include any of the the active agents as listed in claim 10 of WO2015/136541, which is incorporated herein by reference.

[1458] Any of the PD-L1 antibodies described herein (including at least the antibodies described in any of concepts 1 to 40, and the PD-L1 antibodies described in aspect 1a) may be used for the treatment of the neurodegenerative diseases, disorders or conditions described above.

[1459] Exemplary cancers in humans include a Merkel cell carcinoma, breast cancer, prostate cancer, basal cell carcinoma, biliary tract cancer, bladder cancer, bone cancer, brain and CNS cancer (e.g. gliomblastoma), cervical cancer, choriocarcinoma, colon and rectum cancer, connective tissue cancer, cancer of the digestive system; endometrial cancer, esophageal cancer; eye cancer; cancer of the head and neck; nasopharyngeal cancer; gastric cancer; intra-epithelial neoplasm; kidney cancer; larynx cancer; leukemia; liver cancer; lung cancer (e.g. small cell and non-small cell); lymphoma including Hodgkin's and Non-Hodgkin's lymphoma including but not limited to DLBCL; Chronic lymphocytic leukaemia, melanoma; uveal melanoma, myeloma, neuroblastoma, oral cavity cancer (e.g., lip, tongue, mouth, and pharynx); ovarian cancer; pancreatic cancer, retinoblastoma; rhabdomyosarcoma; rectal cancer, renal cancer (renal cell carcinoma (RCC)), cancer of the respiratory system; sarcoma, skin cancer; stomach cancer, testicular cancer, thyroid cancer; uterine cancer, cancer of the urinary system, as well as other carcinomas and sarcomas. Further examples of virally induced cancers including; Nasopharyngeal carcinoma, certain Types of NHL (for example but not limited to EBV+ CNS lymphomas, DLBCL and BL, Hodgkins lymphoma (thought to be EBV driven) HPV-related cervical and head and neck squamous cell carcinomas); HBV hepatocellular carcinoma.

[1460] Exemplary chronic infections in humans include HIV, hepatitis B virus (HBV), and hepatitis C virus (HCV).

[1461] Proliferative or invasion-related diseases that can be treated with the antibodies or antigen binding fragments described herein include neoplastic diseases, and the metastasis associated with such neoplastic disease, such as, melanoma, uveal melanoma, skin cancer, small cell lung cancer, non-small cell lung cancer, salivary gland, glioma, hepatocellular (liver) carcinoma, gallbladder cancer, thyroid tumour, bone cancer, gastric (stomach) cancer, prostate cancer, breast cancer (including triple negative breast cancer), ovarian cancer, cervical cancer, uterine cancer, vulval cancer, endometrial cancer, testicular cancer, bladder cancer, lung cancer, glioblastoma, thyroid cancer, endometrial cancer, kidney cancer, colon cancer, colorectal cancer, pancreatic cancer, esophageal carcinoma, brain/CNS cancers, neuronal cancers, head and neck cancers (including but not limited to squamous cell carcinoma of the head and neck (SCCHN)), mesothelioma, sarcomas, biliary (cholangiocarcinoma), small bowel adenocarcinoma, pediatric malignancies, epidermoid carcinoma, sarcomas, cancer of the pleural/peritoneal membranes and leukaemia, including acute myeloid leukaemia, acute lymphoblastic leukaemia, and multiple myeloma. Treatable chronic viral infections include HIV, hepatitis B virus (HBV), and hepatitis C virus (HCV) in humans, simian immunodeficiency virus (SIV) in monkeys, and lymphocytic choriomeningitis virus (LCMV) in mice.

[1462] The antibody or antigen binding fragment thereof can be administered alone, or in combination with other antibodies or chemo therapeutic drugs, radiation therapy or therapeutic vaccines. In one embodiment, the antibody or antigen binding fragment thereof is administered as an antibody-drug conjugate in which the antibody or antigen binding fragment thereof is linked to a drug moiety such as a cytotoxic or cytostatic agent. The use of antibody-drug conjugates for the local delivery of cytotoxic or cytostatic agents in the treatment of cancer allows targeted delivery of the drug moiety to tumours, and intracellular accumulation therein, where systemic administration of unconjugated drug may result in unacceptable levels of toxicity. Drugs in antibody drug conjugates can include, but are not limited to, daunomycin, doxorubicin, methotrexate, and vindesine. Toxins can also be used in antibody-toxin conjugates, including, for example, bacterial toxins such as diphtheria toxin, plant toxins such as ricin, small molecule toxins such as geldanamycin. The toxins may effect their cytotoxic and cytostatic effects by mechanisms including tubulin binding, DNA binding, or topoisomerase.

[1463] Detection

[1464] In another embodiment, the antibodies or antigen binding fragments can be used to detect the presence, absence and/or level of surface expressed PD-L1 expression in a sample. PD-L1 surface expression can be detected in vivo and/or in vitro and is useful in helping diagnose diseases or conditions that involve expression and/or overexpression of PD-L1.

[1465] In Vitro Diagnostic

[1466] In another embodiment, the PD-L1 specific antibodies or antigen binding fragments thereof can be used for the assessment of expression and localization of PD-L1 in a biological sample from a patient. In one embodiment, the biological sample is a tissue sample and PD-L1 expression is detected using known methods such as FLOW cytometry, IHC in fresh tissue, IHC in FFPE tissue and/or IHC in frozen tissue. In other embodiments, the biological sample is blood, plasma or serum.

[1467] In one embodiment, the antibody or antibody fragment described herein is labeled with a detectable moiety, for example, a radiolabel, fluorescent label, enzymatic label chemiluminescent labeled or a biotinyl group. Radioisotopes or radionuclides may include ³H, ¹⁴C, ¹⁵N, ³⁵S, ⁹⁰Y, ⁹⁹Tc, ¹¹⁵In, ¹²⁵I, ¹³¹I, fluorescent labels may include rhodamine, lanthanide phosphors or FITC and enzymatic labels may include horseradish peroxidase, β-galactosidase, luciferase, alkaline phosphatase. Additional labels include, by way of illustration and not limitation: enzymes, such as glucose-6-phosphate dehydrogenase (“G6PDH”), alpha-D-galactosidase, glucose oxydase, glucose amylase, carbonic anhydrase, acetylcholinesterase, lysozyme, malate dehydrogenase and peroxidase; dyes; additional fluorescent labels or fluorescers include, such as fluorescein and its derivatives, fluorochrome, GFP (GFP for “Green Fluorescent Protein”), dansyl, umbelliferone, phycoerythrin, phycocyanin, allophycocyanin, o-phthaldehyde, and fiuorescamine; fluorophores such as lanthanide cryptates and chelates e.g. Europium etc (Perkin Elmer and Cisbio Assays); chemoluminescent labels or chemiluminescers, such as isoluminol, luminol and the dioxetanes; sensitisers; coenzymes; enzyme substrates; particles, such as latex or carbon particles; metal sol; crystallite; liposomes; cells, etc., which may be further labelled with a dye, catalyst or other detectable group; molecules such as biotin, digoxygenin or 5-bromodeoxyuridine; toxin moieties, such as for example a toxin moiety selected from a group of Pseudomonas exotoxin (PE or a cytotoxic fragment or mutant thereof), Diptheria toxin or a cytotoxic fragment or mutant thereof, a botulinum toxin A, B, C, D, E or F, ricin or a cytotoxic fragment thereof e.g. ricin A, abrin or a cytotoxic fragment thereof, saporin or a cytotoxic fragment thereof, pokeweed antiviral toxin or a cytotoxic fragment thereof and bryodin 1 or a cytotoxic fragment thereof.

[1468] In Vivo Diagnostic

[1469] In one embodiment, the antibody or antigen binding fragment thereof can be administered to a patient, wherein the antibody or antigen binding fragment is conjugated to a label. The presence of the label in the patient can be measured or observed, wherein a relatively high amount of the label may indicate a high risk of disease and a relatively low amount of the label may indicate a relatively low risk of the disease. In one embodiment, the label is a contrast agent, isotopic tag, or fluorescent marker, such as green fluorescent protein.

[1470] In one embodiment, the antibody or antigen binding fragment is used to monitor therapy that involves the use of other therapeutic agents, including, for example, chemotherapeutic agents or other antibodies that specifically bind PD-L1. In one embodiment, the antibody does not compete with the therapeutic PD-L1 antibodies.

[1471] Guide Patient Selection

[1472] In one embodiment, detection of PD-L1 expression can be used to guide patient selection. In one embodiment, the antibodies or antigen binding fragments thereof can be used to assist in patient selection for therapeutic antibody treatment with an anti-PD-L1 antibody, including, but not limited to anti-PD-L1 antibodies disclosed in WO2011/066389, entitled “Targeted Binding Agents Against B7-Hi”, which antibodies and sequences are incorporated herein by reference. In another embodiment, the antibodies or antigen binding fragments thereof can be used to assist in patient selection for treatment with immunotherapies such as anti-PD-L1, anti-CTLA4, anti-OX40, anti-PD-1, vaccines etc. In some cases, higher levels of PD-L1 may be indicative of successful therapy, whereas lower levels may indicate a reduced likelihood of success. Preferential expression of splice variants and/or protein processing may produce unique protein mixture profiles which may impact a patient's response to treatment or may change following treatment. These profiles may help to identify patients and define patient subsets who should receive treatment, continue to receive treatment or who should receive an alternative treatment. In another embodiment, the antibodies or antigen binding fragments thereof can be used for detection of PD-L1 isoforms. Patient samples can include, for example, blood, plasma, serum, sputum, saliva, urine, CSF, tears, exhaled exogenous particle samples, cell supernatant, cell or tissue lysate or tissue samples.

[1473] In one embodiment, the antibodies or antigen binding fragments thereof can be used to identify the presence, absence and/or level of PD-L1 expression at baseline, i.e., before treatment.

[1474] In another embodiment, the PD-L1 specific antibodies or antigen binding fragments thereof can be used as an exclusion marker to suggest treatment with therapies that do not target PD-L1. In another embodiment, the PD-L1 specific antibodies or antigen binding fragments thereof can be used as a prognostic marker for life expectancy. In particular, PD-L1 expression on tumours is linked to poor prognosis and life expectancy can be estimated based on historical data within tumour types.

[1475] Methods for detection of proteins are known, and include, for example, IHC, FLOW cytometery, Western blotting and Mass Spectroscopy, Immunoprecipitation, aptamers, immuno-PCR, and protein array.

[1476] Guide Therapy

[1477] The antibodies can be used to guide therapy. For example, the antibodies or antigen binding fragments thereof can be used to identify the presence, absence and/or level of PD-L1 expression during or after treatment. In one embodiment, the antibodies or antigen binding fragments thereof can be used as early response biomarkers to assist in patient management, drug approval and reimbursement. In another embodiment, the antibodies or antigen binding fragments thereof can be used to identify the presence, absence and/or level of PD-L1 expression to help guide therapy. For example, PD-L1 expression can help determine whether the treatment is effective, and hence, whether or not treatment should be continued, or whether the dose should be adjusted (increased or decreased) and whether a combination regimen should be changed. For example, in one embodiment, the PD-L1 specific antibodies or antigen binding fragments thereof can be used for determining receptor occupancy of PD-L1 on cells in a patient treated with anti-PD-L1 therapy for dose setting (PK/PD). In particular, receptor occupancy can be used as a measure of target engagement or target coverage. Estimates of the amount or duration of target engagement needed to elicit a biological or clinical response could be used to determine if a patient has been dosed sufficiently or not. In particular, the antibodies can be used to assist in evaluating the relationship between, dose, exposure, receptor occupancy, pharmacodynamic response and clinical benefit.

[1478] Monitor Efficacy of Therapy

[1479] In another embodiment, the PD-L1 specific antibodies or antigen binding fragments thereof can be used for patient monitoring, to help evaluate whether a course of treatment is effective and whether or not treatment should be continued. For example, in one embodiment, the antibodies or antigen binding fragments thereof can be used detect expression before a patient receives therapeutic treatment that targets PD-L1. In another embodiment, the antibodies or antigen binding fragments thereof can be used to detect expression during therapy or after a patient has received therapeutic anti-PD-L1 treatment. In another embodiment, the antibodies or antigen binding fragments thereof can be used as an early response marker to assist in the determination as to whether or not a course of therapy is effective and should be continued or discontinued. In one embodiment, the expression of PD-L1 is detected after washout, wherein the term “washout” refers to a period of time after which the administered drug has been eliminated from the body. In particular, expression of PD-L1 may be detected after washout if the patient is treated with anti-PD-L1 therapy that competes with the detection antibody. However, if the patient is treated with an antibody that does not compete with an anti-PD-L1 antibody, such as anti-CTLA-4 or anti-PD-1, detection can be performed without waiting for washout. In another embodiment, the detection antibody can bind to PD-L1 but not compete with a therapeutic antibody that binds to PD-L1. In this situation, washout may not be necessary. The washout period can vary depending upon many factors, but is generally a period of at least about 1, 2, 3, 4, 5, or 6 weeks and up to about 1, 2, 3, 4, 5 or 6 months from the most recent chemotherapy or immunotherapy treatment. The antibodies or antigen binding fragments thereof can be used to determine expression of PD-L1 on biopsy samples or on circulating tumour cells (CTC).

[1480] In one embodiment, labelled antibodies or antigen binding fragments thereof can be used to identify a peripheral correlate to enable non-invasive assessment of tumour status pre, during and post treatment.

[1481] Methods for detection of proteins are known, and include, for example, IHC, flow cytometery, Western blotting and Mass Spectroscopy, immunoprecipitation, aptamers, immuno-PCR., and protein array.

[1482] Identify Protein Binding Partners for PD-L1

[1483] In another embodiment, antibodies or antigen binding fragments thereof can be used as a capture reagent or detection reagent for examination of the protein binding partners of PD-L1 protein species in the context of a protein “pull-down.” A protein “pull down” refers to immunoprecipitation of intact protein complexes, such as antigen along with any proteins or ligands that are bound to it—also known as co-immunoprecipitation (Co-IP). Co-IP works by selecting an antibody that targets a known protein that is believed to be a member of a larger complex of proteins. By targeting the known member with an antibody it may become possible to pull the entire protein complex out of solution and thereby identify unknown members of the complex. Complete understanding of the regulation of immune recognition through and PD-1 axis vs. CTLA-4 etc. is not fully understood. As such, antibodies and antigen binding fragments could improve knowledge of the interplay among accessory proteins and factors, which may determine a patient's propensity to respond to specific therapies or immunotherapy in general.

### 7. Pharmaceutical Compositions

[1484] Unless otherwise apparent from the context, the compositions for antibodies or fragments applies mutatis mutandis to the immunocytokines and multispecific (e.g. bispecific or dual-binding antibodies) of the invention. Where described in the context of PD-L1 or another target that is not TIGIT, the features in this section 7 apply mutatis mutandis to the TIGIT aspects of the invention in place of PD-L1 or such other target.

[1485] In one embodiment, there is provided a pharmaceutical composition comprising an effective amount of an antibody or antigen binding fragment and a pharmaceutically acceptable carrier. An effective amount of antibody to be employed therapeutically will depend, for example, upon the therapeutic objectives, the route of administration, and the condition of the patient. In one embodiment, the composition includes other excipients or stabilizers.

[1486] Pharmaceutically acceptable carriers are known and include carriers, excipients, or stabilizers that are nontoxic to the cell or mammal being exposed thereto at the dosages and concentrations employed. Often the physiologically acceptable carrier is an aqueous pH buffered solution. Examples of physiologically acceptable carriers include buffers such as phosphate, citrate, and other organic acids; antioxidants including ascorbic acid; low molecular weight (less than about 10 residues) polypeptide; proteins, such as serum albumin, gelatin, or immunoglobulins; hydrophilic polymers such as polyvinylpyrrolidone; amino acids such as glycine, glutamine, asparagine, arginine or lysine; monosaccharides, disaccharides, and other carbohydrates including glucose, mannose, or dextrins; chelating agents such as Ethylenediaminetetraacetic acid (EDTA); sugar alcohols such as mannitol or sorbitol; salt-forming counterions such as sodium; and/or nonionic surfactants such as TWEEN™, polyethylene glycol (PEG), and PLURONICS™.

[1487] The antibodies or antigen binding fragments can be administered intravenously or through the nose, lung, for example, as a liquid or powder aerosol (lyophilized). The composition can also be administered parenterally or subcutaneously. When administered systemically, the composition should be sterile, pyrogen-free and in a physiologically acceptable solution having due regard for pH, isotonicity and stability. These conditions are known to those skilled in the art.

[1488] Methods of administering a prophylactic or therapeutic agent (e.g., an antibody as disclosed herein), or pharmaceutical composition include, but are not limited to, parenteral administration (e.g., intradermal, intramuscular, intraperitoneal, intravenous and subcutaneous), epidural, and mucosal (e.g., intranasal and oral routes). In a specific embodiment, a prophylactic or therapeutic agent (e.g., an antibody as disclosed herein), or a pharmaceutical composition is administered intranasally, intramuscularly, intravenously, or subcutaneously. The prophylactic or therapeutic agents, or compositions may be administered by any convenient route, for example by infusion or bolus injection, by absorption through epithelial or mucocutaneous linings (e.g., oral mucosa, intranasal mucosa, rectal and intestinal mucosa, etc.) and may be administered together with other biologically active agents. Administration can be systemic or local. Each dose may or may not be administered by an identical route of administration. In one embodiment, an anti-PD-L1 antibody or fragment as disclosed herein may be administered via multiple routes of administration simultaneously or subsequently to other doses of the same or a different anti-PD-L1 antibody or fragment as disclosed herein.

[1489] Various delivery systems are known and can be used to administer a prophylactic or therapeutic agent (e.g., an antibody or fragment as disclosed herein), including, but not limited to, encapsulation in liposomes, microparticles, microcapsules, recombinant cells capable of expressing the antibody, receptor-mediated endocytosis (see, e.g., Wu and Wu, J. Biol. Chem. 262:4429-4432 (1987)), construction of a nucleic acid as part of a retroviral or other vector, etc. In addition, pulmonary administration can also be employed, e.g., by use of an inhaler or nebulizer, and formulation with an aerosolizing agent. See, e.g., U.S. Pat. Nos. 6,019,968, 5,985,320, 5,985,309, 5,934,272, 5,874,064, 5,855,913, 5,290,540, and 4,880,078; and PCT Publication Nos. WO92/19244, WO97/32572, WO97/44013, WO98/31346, and WO99/66903, each of which is incorporated herein by reference their entirety.

[1490] In a specific embodiment, it may be desirable to administer a prophylactic or therapeutic agent, or a pharmaceutical composition as described herein locally to the area in need of treatment. This may be achieved by, for example, local infusion, by topical administration (e.g., by intranasal spray), by injection, or by means of an implant, said implant being of a porous, non-porous, or gelatinous material, including membranes, such as sialastic membranes, or fibres. When administering an anti-PD-L1 antibody or fragment, care must be taken to use materials to which the antibody does not absorb.

### 8. Kits and Articles of Manufacture

[1491] Unless otherwise apparent from the context, the kits and articles of manufacture for antibodies or fragments applies mutatis mutandis to the immunocytokines and multispecific (e.g. bispecific or dual-binding antibodies) of the invention. Where described in the context of PD-L1 or another target that is not TIGIT, the features in this section 8 apply mutatis mutandis to the TIGIT aspects of the invention in place of PD-L1 or such other target.

[1492] In one embodiment, the invention provides a kit for detecting PD-L1 in a biological sample. The kit can be used to screen for PD-L1 related diseases. In one embodiment, the kit includes an antibody or antigen binding fragment and a means for determining whether the antibody or antigen binding fragment is bound to PD-L1 in a sample. In one embodiment, the antibody or antigen binding fragment is labelled. In another embodiment, the antibody or antigen binding fragment is an unlabelled primary antibody and the kit includes means for detecting the primary antibody. In one embodiment, the means for detecting includes a labelled secondary antibody that is an anti-immmunoglobulin antibody. The antibody may be labelled with any suitable marker, including, for example, a fluorochrome, an enzyme, a radionuclide and a radiopaque material. Suitable antibodies and antigen binding fragments are described in detail above.

[1493] In one embodiment, a kit for detecting PD-L1 is provided, wherein the kit includes an antibody or antigen binding fragment described herein. In one embodiment, the kit may also include instructions and one or more reagents for detecting PD-L1. In one embodiment, the kit includes an antigen or antigen binding fragment described herein, along with instructions for preparing a formalin-fixed paraffin-embedded (FFPE) tissue sample for IHC and/or one or more reagents for IHC. In one embodiment, the kit includes an antigen or antigen binding fragment described herein as a primary antibody and a secondary antibody that specifically binds thereto. In one embodiment, the kit includes a labeled antigen or antigen binding fragment described herein, wherein the label includes a fluorescent label such as fluoroscein or rhodamine or an enzymatic reporter such as horseradish peroxidase (HRP) or alkaline phosphatase (AP). In one embodiment, the kit includes a blocking reagent that includes at least about 1% and up to about 5%, or between about 2% and 3%, or about 2% cold water fish skin gelatin protein (CWF) in a buffer, such as phosphate buffered saline (PBS). In one embodiment, the kit includes buffer for antigen retrieval, such as a citrate buffer, for example sodium citrate, at a concentration of at least about 1, 2, 5, or 10 mM and up to about 10, 15 or 20 mM and at a pH between about 5.5 and 9, or a pH of about 6.

[1494] In another embodiment, a kit for treating diseases involving the expression of PD-L1 is provided, wherein the kit includes an antibody or antigen binding fragment described herein and instructions to administer the antibody or antigen binding fragment to a subject in need of treatment. There is also provided a pharmaceutical or diagnostic pack or kit comprising one or more containers filled with one or more of the ingredients of the pharmaceutical compositions as disclosed herein, such as one or more anti-PD-L1 antibodies or fragments provided herein. Optionally associated with such container(s) can be a notice in the form prescribed by a governmental agency regulating the manufacture, use or sale of pharmaceuticals or biological products, which notice reflects approval by the agency of manufacture, use or sale for human administration, e.g., an authorisation number.

[1495] In another embodiment, an article of manufacture that includes a container in which a composition containing an antibody or antigen binding fragment described herein and a package insert or label indicating that the composition can be used to treat diseases characterized by the expression or overexpression of PD-L1 is provided. In one embodiment, there is provided a kit for treating and/or preventing a PD-L1-mediated condition or disease, the kit comprising an antibody or fragment as disclosed herein in any embodiment or combination of embodiments (and optionally a further therapeutic agent as described elsewhere herein) optionally in combination with a label or instructions for use to treat and/or prevent said disease or condition in a human; optionally wherein the label or instructions comprise a marketing authorisation number (e.g., an FDA or EMA authorisation number); optionally wherein the kit comprises an IV or injection device that comprises the antibody or fragment. In another embodiment, the kit comprises an antibody or antigen binding fragment thereof contained within a container or an IV bag. In another embodiment, the container or IV bag is a sterile container or a sterile IV bag. In another embodiment, the antibody or antigen binding fragment therefore is formulated into a pharmaceutical composition contained within a (sterile) container or contained within a (sterile) IV bag. In a further embodiment, the kit further comprises instructions for use.

### 9. Anti-TIGIT Antibodies, Fragments & Immunocytokines

[1496] TIGIT, also named VSIG9, VSTM3 and WUCAM, is a 39.6 KDa (monomer) surface protein composed of an Immunoglobulin Variable (IgV) domain, a transmembrane domain and an Immunoreceptor Tyrosine-based Inhibitory Motif (ITIM) in its cytoplasmic domain. TIGIT is expressed on T cells, both memory and T_{regs} subsets, as well as on NK cells [1]. TIGIT expression was confirmed by quantitative RT-PCR analysis in resting CD4⁺CD25^{hi} T_{regs} cells and memory CD45RO⁺ cells. Expression of this protein was found to be upregulated in naïve CD45RA⁺CD4⁺ T cells following activation. TIGIT expression has also been shown to increase in activated Tregs and memory cells. In another publication [2], high levels of TIGIT were found to be associated with exhausted CD8⁺ T cells.

[1497] CD155 (PVR) was identified as TIGIT's high affinity receptor highly expressed on dendritic cells (DCs), fibroblasts and endothelial cells. CD112 (PVRL2) and CD113 (PVRL3), also members of the PVR-like proteins, interact, albeit with lower affinities, with TIGIT. While TIGIT/CD155 cell binding Kd is 1-3 nM, the reported Kd value for interaction between TIGIT/PVRL3 is 38.9 nM. TIGIT shares its binding partners with other Ig-superfamily family members DNAM-1 (CD226) and CD96 (TACTILE). Therefore, affinities reported for members of this family have biological relevance as it might help to understand the dynamic between TIGIT and CD96, both inhibitory receptors unlike DNAM-1 which has been shown to provide activating signals able to modulate activity of T cells and NK cells. The reported high affinity with which CD155 binds to TIGIT (1-3 nM) compared to CD96 (37.6 nM) or DNAM-1 (119 nM) suggests that TIGIT/CD115 may be the dominant interaction, which has implications for the use of an anti-TIGIT antibody for the treatment of cancer. Blocking of this interaction may therefore re-direct binding of CD155 to DNAM-1 and shift balance from suppression to activation of cells that regulate the immune system in the tumour microenviroment.
[1498] 1. Yu X, Harden K, Gonzalez L C, Francesco M, Chiang E, Irving B, Tom I, Ivelja S, Refino C J, Clark H, Eaton D, Grogan J L. The surface protein TIGIT suppresses T cell activation by promoting the generation of mature immunoregulatory dendritic cells. Nat Immunol. 2009 January; 10(1):48-57.
[1499] 2. Johnston R J, Comps-Agrar L, Hackney 3, Yu X 1, Huseni M, Yang Y, Park S, Javinal V, Chiu H, Irving B, Eaton D L, Grogan J L. The Immunoreceptor TIGIT Regulates Antitumor and Antiviral CD8(+) T Cell Effector Function. Cancer Cell. 2014 Dec. 8; 26(6):923-37.

[1500] Generally, where the disclosure of features are provided in the context of anti-PD-L1 and/or ICOS antibodies of the invention, these features may alternatively be applied to the anti-TIGIT aspects of the invention herein (eg, anti-TIGIT antibodies, fragments, ICKs, methods and uses). For example, the compositions, formulations and routes of administration disclosed in the context of anti-PD-L1 and ICOS antibodies of the invention, may be applied mutatis mutandis to the anti-TIGIT aspects of the invention herein. For example, any composition, method or use disclosed in the context of anti-PD-L1 and/or ICOS antibodies of the invention can additionally comprise (or comprise the use of) any anti-TIGIT antibody, fragment or ICK disclosed herein. In one embodiment disclosed therein, the PD-L1 antibodies as disclosed herein may be formatted in a bispecific antibody which has specificity for both PD-L1 (e.g. human PD-L1) and for TIGIT (e.g. an antagonist to TIGIT, such as human TIGIT). In one embodiment disclosed therein, the ICOS antibodies as disclosed herein may be formatted in a bispecific antibody which has specificity for both ICOS (e.g. human ICOS) and for TIGIT (e.g. an antagonist to TIGIT, such as human TIGIT).

[1501] Generally, where the disclosure of features is said to be useful mutatis mutandis to the anti-TIGIT aspects of the invention, this means that the disclosure can be read as applying to the anti-TIGIT aspects (such as antibodies, fragments, ICKs, methods or uses) but with the binding specificity relating to TIGIT instead of PD-L1 or another target antigen discussed in that disclosure.

[1502] Any method of treating or preventing or any use in the manufacture disclosed herein for anti-PD-L1 antibodies, fragments, immunocytokines and fusion proteins apply mutatis mutandis to the anti-TIGIT antibodies, fragments, immunocytokines of the invention. Any cancer discussed in the context of treating or preventing using an anti-PD-L1 antibody is applicable to treatment or prevention using an anti-TIGIT antibody, fragment, immunocytokine or fusion protein described herein.

[1503] In one embodiment, the anti-TIGIT antibody is a polyclonal antibody. Methods for generating polyclonal antibodies are known, and include, for example, inoculating a suitable mammal with an antigen to induce the immune system of the animal to produce immunoglobulins (IgGs) that specifically bind the injected antigen. Examples of suitable mammals include, for example, mouse, guinea pig, hamster, rat, rabbit sheep or goat. The polyclonal IgG is then typically purified from the mammal's serum. In one embodiment, the antibody is a polyclonal antibody that binds to a surface expressed protein. In another embodiment, the antibody is a polyclonal antibody that specifically binds to a TIGIT, such as a human TIGIT. In another embodiment, the antibody is a polyclonal antibody that specifically binds surface expressed TIGIT. In a more particular embodiment, the polyclonal antibody or antigen binding fragment thereof specifically binds human TIGIT. In another embodiment, the antibody is a polyclonal antibody that specifically binds soluble TIGIT. The term “soluble” also refers to a protein, such as TIGIT that is lacking one or more transmembrane domain or cytoplasmic domains. In one embodiment, the “soluble” form of TIGIT lacks both the transmembrane domain and the cytoplasmic domain. In one embodiment, the antibody is a polyclonal antibody that binds “free” TIGIT (i.e. TIGIT that is not associated with a cell membrane or surface, either directly or indirectly).

[1504] In another embodiment, the anti-TIGIT antibody can be a monoclonal antibody. Methods of making monoclonal antibodies are known and include, for example, fusing myeloma cells with the cells from an animal that was immunized with the desired antigen. In other embodiments, the monoclonal antibodies may be generated using recombinant DNA technology. In one embodiment, the antibody is a monoclonal antibody that specifically binds a surface expressed protein. In one embodiment, the antibody is a fully human monoclonal antibody. In another embodiment, the antibody is a monoclonal antibody that specifically binds to one or more TIGIT proteins. In a more specific embodiment, the antibody is a monoclonal antibody that specifically binds TIGIT. In another embodiment, the antibody is a monoclonal antibody that specifically binds surface expressed TIGIT. In a more particular embodiment, the monoclonal antibody or antigen binding fragment thereof specifically binds human TIGIT, eg, isoform 2. In another embodiment, the antibody is a monoclonal antibody that specifically binds soluble TIGIT. In one embodiment, the antibody is a monoclonal antibody that specifically binds soluble TIGIT that is lacking one or more transmembrane domain or cytoplasmic domains. In one embodiment, the antibody is a monoclonal antibody that specifically binds soluble TIGIT that is lacking both the transmembrane domain and the cytoplasmic domain. In one embodiment, the antibody is a monoclonal antibody that binds “free” TIGIT″ (i.e. TIGIT that is not associated with a cell membrane or surface, either directly or indirectly).

[1505] In an example the binding site(s) of the anti-TIGIT antibody or fragment are selected from a plurality (e.g. library) of binding sites. For example, the plurality of binding sites comprises or consists of a plurality of 4-chain antibodies or fragments thereof, e.g. dAbs, Fabs or scFvs. Suitable methods for producing pluralities of binding sites for screening include phage display (producing a phage display library of antibody binding sites), ribosome display (producing a ribosome display library of antibody binding sites), yeast display (producing a yeast display library of antibody binding sites), or immunisation of a non-human vertebrate (e.g. a rodent, e.g. a mouse or rat, e.g. a Velocimouse™, Kymouse™, Xenomouse™, Aliva Mouse™, HuMab Mouse™, Omnimouse™, Omnirat™ or MeMo Mouse™) with hTIGIT or a hTIGIT epitope and isolation of a repertoire of antibody-producing cells (e.g. a B-cell, plasma cell or plasmablast repertoire) and/or a repertoire of isolated antibodies, fragments or binding sites.

[1506] TIGIT binding ability, specificity and affinity (Kd, K_{off} and/or Kₒₙ) can be determined by any routine method in the art, e.g. by surface plasmon resonance (SPR). The term “Kd” or “K_{D}”, as used herein, is intended to refer to the equilibrium dissociation constant of a particular antibody-antigen interaction. Such binding measurements can be made using a variety of binding assays known in the art, e.g. using surface plasmon resonance (SPR), such as by Biacorem or using the ProteOn XPR36™ (Bio-Rad®), using KinExA® (Sapidyne Instruments, Inc), or using ForteBio Octet (Pall ForteBio Corp.).

[1507] In one embodiment, the surface plasmon resonance (SPR) is carried out under any of the conditions described above wrt anti-PD-L1 antibodies.

[1508] The present inventors have identified a number of antibodies having specificity for hTIGIT, which have a number of potential utilities and benefits over existing antibodies. For example, the antibodies described herein may have one or more of the following properties:
[1509] a. Specificity for blocking only one of the ligands of TIGIT (e.g. blocks CD155/TIGIT interaction, but not DNAM-1/TIGIT interaction)
[1510] b. Immunogenicity/lack of side effects
[1511] c. Solubility
[1512] d. Stability
[1513] e. Ease of formulation
[1514] f. Frequency of dosing and/or route of administration, for example due to improved half-life over existing anti-TIGIT antibodies
[1515] g. Manufacturability (e.g. expression, ease of purification, isoforms)

[1516] KY01 is an anti-TIGIT antibody that comprises a heavy chain variable domain (VH) amino acid sequence of SEQ ID No:603, comprising the CDRH1 amino acid sequence of SEQ ID No:597 (IMGT) or SEQ ID No:600 (Kabat), the CDRH2 amino acid sequence of SEQ ID No:598 (IMGT) or SEQ ID No:601 (Kabat), and the CDRH3 amino acid sequence of SEQ ID No:599 (IMGT) or SEQ ID No:602 (Kabat). The nucleic acid sequence encoding the VH domain is SEQ ID No:604. KY01 has a light chain variable domain (VL) amino acid sequence of SEQ ID No:613, comprising the CDRL1 amino acid sequence of SEQ ID No:607 (IMGT) or SEQ ID No:610 (Kabat), the CDRL2 amino acid sequence of SEQ ID No:608 (IMGT) or SEQ ID No:611 (Kabat), and the CDRL3 amino acid sequence of SEQ ID No:609 (IMGT) or SEQ ID No:612 (Kabat). The nucleic acid sequence encoding the VL domain is SEQ ID No:614. Optionally, the VH domain is comprised by a heavy chain, wherein the heavy chain comprises any of the heavy chain constant region sequences described herein, e.g. SEQ ID No:193, SEQ ID No:195, SEQ ID No:197, SEQ ID No:199, SEQ ID No:203, SEQ ID No:205, SEQ ID No:340, SEQ ID No:524, SEQ ID No:526, SEQ ID No:528, SEQ ID No:530, SEQ ID No:532 or SEQ ID No:534. Optionally, the VL domain is comprised by a light chain, wherein the light chain comprises any of the light chain constant region sequences described herein, e.g. SEQ ID Nos:207, 209, 211, 213, 215, 217, 219, 223, 225, 227, 229, 231, 233, 235, 237, 536 and 538. A full length heavy chain amino acid sequence is SEQ ID No:605 (heavy chain nucleic acid sequence SEQ ID No:606). A full length light chain amino acid sequence is SEQ ID No:615 (light chain nucleic acid sequence SEQ ID No:616).

[1517] KY02 is an anti-TIGIT antibody that comprises a heavy chain variable domain (VH) amino acid sequence of SEQ ID No:623, comprising the CDRH1 amino acid sequence of SEQ ID No:617 (IMGT) or SEQ ID No:620 (Kabat), the CDRH2 amino acid sequence of SEQ ID No:618 (IMGT) or SEQ ID No:621 (Kabat), and the CDRH3 amino acid sequence of SEQ ID No:619 (IMGT) or SEQ ID No:622 (Kabat). The nucleic acid sequence encoding the VH domain is SEQ ID No:624. KY02 has a light chain variable domain (VL) amino acid sequence of SEQ ID No:633, comprising the CDRL1 amino acid sequence of SEQ ID No:627 (IMGT) or SEQ ID No:630 (Kabat), the CDRL2 amino acid sequence of SEQ ID No:628 (IMGT) or SEQ ID No:631 (Kabat), and the CDRL3 amino acid sequence of SEQ ID No:629 (IMGT) or SEQ ID No:632 (Kabat). The nucleic acid sequence encoding the VL domain is SEQ ID No:634. Optionally, the VH domain is comprised by a heavy chain, wherein the heavy chain comprises any of the heavy chain constant region sequences described herein, e.g. SEQ ID No:193, SEQ ID No:195, SEQ ID No:197, SEQ ID No:199, SEQ ID No:203, SEQ ID No:205, SEQ ID No:340, SEQ ID No:524, SEQ ID No:526, SEQ ID No:528, SEQ ID No:530, SEQ ID No:532 or SEQ ID No:534. Optionally, the VL domain is comprised by a light chain, wherein the light chain comprises any of the light chain constant region sequences described herein, e.g. SEQ ID Nos:207, 209, 211, 213, 215, 217, 219, 223, 225, 227, 229, 231, 233, 235, 237, 536 and 538. A full length heavy chain amino acid sequence is SEQ ID No:625 (heavy chain nucleic acid sequence SEQ ID No:626). A full length light chain amino acid sequence is SEQ ID No:635 (light chain nucleic acid sequence SEQ ID No:636).

[1518] KY03 is an anti-TIGIT antibody that comprises a heavy chain variable domain (VH) amino acid sequence of SEQ ID No:643, comprising the CDRH1 amino acid sequence of SEQ ID No:637 (IMGT) or SEQ ID No:640 (Kabat), the CDRH2 amino acid sequence of SEQ ID No:638 (IMGT) or SEQ ID No:641 (Kabat), and the CDRH3 amino acid sequence of SEQ ID No:639 (IMGT) or SEQ ID No:642 (Kabat). The nucleic acid sequence encoding the VH domain is SEQ ID No:644. KY03 has a light chain variable domain (VL) amino acid sequence of SEQ ID No:653, comprising the CDRL1 amino acid sequence of SEQ ID No:647 (IMGT) or SEQ ID No:650 (Kabat), the CDRL2 amino acid sequence of SEQ ID No:648 (IMGT) or SEQ ID No:651 (Kabat), and the CDRL3 amino acid sequence of SEQ ID No:649 (IMGT) or SEQ ID No:652 (Kabat). The nucleic acid sequence encoding the VL domain is SEQ ID No:654. Optionally, the VH domain is comprised by a heavy chain, wherein the heavy chain comprises any of the heavy chain constant region sequences described herein, e.g. SEQ ID No:193, SEQ ID No:195, SEQ ID No:197, SEQ ID No:199, SEQ ID No:203, SEQ ID No:205, SEQ ID No:340, SEQ ID No:524, SEQ ID No:526, SEQ ID No:528, SEQ ID No:530, SEQ ID No:532 or SEQ ID No:534. Optionally, the VL domain is comprised by a light chain, wherein the light chain comprises any of the light chain constant region sequences described herein, e.g. SEQ ID Nos:207, 209, 211, 213, 215, 217, 219, 223, 225, 227, 229, 231, 233, 235, 237, 536 and 538. A full length heavy chain amino acid sequence is SEQ ID No:645 (heavy chain nucleic acid sequence SEQ ID No:646). A full length light chain amino acid sequence is SEQ ID No:655 (light chain nucleic acid sequence SEQ ID No:656).

[1519] KY04 is an anti-TIGIT antibody that comprises a heavy chain variable domain (VH) amino acid sequence of SEQ ID No:663, comprising the CDRH1 amino acid sequence of SEQ ID No:657 (IMGT) or SEQ ID No:660 (Kabat), the CDRH2 amino acid sequence of SEQ ID No:658 (IMGT) or SEQ ID No:661 (Kabat), and the CDRH3 amino acid sequence of SEQ ID No:659 (IMGT) or SEQ ID No:662 (Kabat). The nucleic acid sequence encoding the VH domain is SEQ ID No:664. KY04 has a light chain variable domain (VL) amino acid sequence of SEQ ID No:673, comprising the CDRL1 amino acid sequence of SEQ ID No:667 (IMGT) or SEQ ID No:670 (Kabat), the CDRL2 amino acid sequence of SEQ ID No:668 (IMGT) or SEQ ID No:671 (Kabat), and the CDRL3 amino acid sequence of SEQ ID No:669 (IMGT) or SEQ ID No:672 (Kabat). The nucleic acid sequence encoding the VL domain is SEQ ID No:674. Optionally, the VH domain is comprised by a heavy chain, wherein the heavy chain comprises any of the heavy chain constant region sequences described herein, e.g. SEQ ID No:193, SEQ ID No:195, SEQ ID No:197, SEQ ID No:199, SEQ ID No:203, SEQ ID No:205, SEQ ID No:340, SEQ ID No:524, SEQ ID No:526, SEQ ID No:528, SEQ ID No:530, SEQ ID No:532 or SEQ ID No:534. Optionally, the VL domain is comprised by a light chain, wherein the light chain comprises any of the light chain constant region sequences described herein, e.g. SEQ ID Nos:207, 209, 211, 213, 215, 217, 219, 223, 225, 227, 229, 231, 233, 235, 237, 536 and 538. A full length heavy chain amino acid sequence is SEQ ID No:665 (heavy chain nucleic acid sequence SEQ ID No:666). A full length light chain amino acid sequence is SEQ ID No:675 (light chain nucleic acid sequence SEQ ID No:676).

[1520] KY05 is an anti-TIGIT antibody that comprises a heavy chain variable domain (VH) amino acid sequence of SEQ ID No:677 and a nucleic acid sequence encoding the VH domain is SEQ ID No:678. KY05 has a light chain variable domain (VL) amino acid sequence of SEQ ID No:679 and a nucleic acid sequence encoding the VL domain is SEQ ID No:680. Optionally, the VH domain is comprised by a heavy chain, wherein the heavy chain comprises any of the heavy chain constant region sequences described herein, e.g. SEQ ID No:193, SEQ ID No:195, SEQ ID No:197, SEQ ID No:199, SEQ ID No:203, SEQ ID No:205, SEQ ID No:340, SEQ ID No:524, SEQ ID No:526, SEQ ID No:528, SEQ ID No:530, SEQ ID No:532 or SEQ ID No:534. Optionally, the VL domain is comprised by a light chain, wherein the light chain comprises any of the light chain constant region sequences described herein, e.g. SEQ ID Nos:207, 209, 211, 213, 215, 217, 219, 223, 225, 227, 229, 231, 233, 235, 237, 536 and 538.

[1521] KY06 is an anti-TIGIT antibody that comprises a heavy chain variable domain (VH) amino acid sequence of SEQ ID No:681 and a nucleic acid sequence encoding the VH domain is SEQ ID No:682. KY06 has a light chain variable domain (VL) amino acid sequence of SEQ ID No:683 and a nucleic acid sequence encoding the VL domain is SEQ ID No:684. Optionally, the VH domain is comprised by a heavy chain, wherein the heavy chain comprises any of the heavy chain constant region sequences described herein, e.g. SEQ ID No:193, SEQ ID No:195, SEQ ID No:197, SEQ ID No:199, SEQ ID No:203, SEQ ID No:205, SEQ ID No:340, SEQ ID No:524, SEQ ID No:526, SEQ ID No:528, SEQ ID No:530, SEQ ID No:532 or SEQ ID No:534. Optionally, the VL domain is comprised by a light chain, wherein the light chain comprises any of the light chain constant region sequences described herein, e.g. SEQ ID Nos:207, 209, 211, 213, 215, 217, 219, 223, 225, 227, 229, 231, 233, 235, 237, 536 and 538.

[1522] KY07 is an anti-TIGIT antibody that comprises a heavy chain variable domain (VH) amino acid sequence of SEQ ID No:685 and a nucleic acid sequence encoding the VH domain is SEQ ID No:686. KY07 has a light chain variable domain (VL) amino acid sequence of SEQ ID No:687 and a nucleic acid sequence encoding the VL domain is SEQ ID No:688. Optionally, the VH domain is comprised by a heavy chain, wherein the heavy chain comprises any of the heavy chain constant region sequences described herein, e.g. SEQ ID No:193, SEQ ID No:195, SEQ ID No:197, SEQ ID No:199, SEQ ID No:203, SEQ ID No:205, SEQ ID No:340, SEQ ID No:524, SEQ ID No:526, SEQ ID No:528, SEQ ID No:530, SEQ ID No:532 or SEQ ID No:534. Optionally, the VL domain is comprised by a light chain, wherein the light chain comprises any of the light chain constant region sequences described herein, e.g. SEQ ID Nos:207, 209, 211, 213, 215, 217, 219, 223, 225, 227, 229, 231, 233, 235, 237, 536 and 538.

[1523] KY08 is an anti-TIGIT antibody that comprises a heavy chain variable domain (VH) amino acid sequence of SEQ ID No:689 and a nucleic acid sequence encoding the VH domain is SEQ ID No:690. KY08 has a light chain variable domain (VL) amino acid sequence of SEQ ID No:691 and a nucleic acid sequence encoding the VL domain is SEQ ID No:692. Optionally, the VH domain is comprised by a heavy chain, wherein the heavy chain comprises any of the heavy chain constant region sequences described herein, e.g. SEQ ID No:193, SEQ ID No:195, SEQ ID No:197, SEQ ID No:199, SEQ ID No:203, SEQ ID No:205, SEQ ID No:340, SEQ ID No:524, SEQ ID No:526, SEQ ID No:528, SEQ ID No:530, SEQ ID No:532 or SEQ ID No:534. Optionally, the VL domain is comprised by a light chain, wherein the light chain comprises any of the light chain constant region sequences described herein, e.g. SEQ ID Nos:207, 209, 211, 213, 215, 217, 219, 223, 225, 227, 229, 231, 233, 235, 237, 536 and 538.

[1524] KY09 is an anti-TIGIT antibody that comprises a heavy chain variable domain (VH) amino acid sequence of SEQ ID No:693 and a nucleic acid sequence encoding the VH domain is SEQ ID No:694. KY09 has a light chain variable domain (VL) amino acid sequence of SEQ ID No:695 and a nucleic acid sequence encoding the VL domain is SEQ ID No:696. Optionally, the VH domain is comprised by a heavy chain, wherein the heavy chain comprises any of the heavy chain constant region sequences described herein, e.g. SEQ ID No:193, SEQ ID No:195, SEQ ID No:197, SEQ ID No:199, SEQ ID No:203, SEQ ID No:205, SEQ ID No:340, SEQ ID No:524, SEQ ID No:526, SEQ ID No:528, SEQ ID No:530, SEQ ID No:532 or SEQ ID No:534. Optionally, the VL domain is comprised by a light chain, wherein the light chain comprises any of the light chain constant region sequences described herein, e.g. SEQ ID Nos:207, 209, 211, 213, 215, 217, 219, 223, 225, 227, 229, 231, 233, 235, 237, 536 and 538.

[1525] KY10 is an anti-TIGIT antibody that comprises a heavy chain variable domain (VH) amino acid sequence of SEQ ID No:697 and a nucleic acid sequence encoding the VH domain is SEQ ID No:698. KY10 has a light chain variable domain (VL) amino acid sequence of SEQ ID No:699 and a nucleic acid sequence encoding the VL domain is SEQ ID No:700. Optionally, the VH domain is comprised by a heavy chain, wherein the heavy chain comprises any of the heavy chain constant region sequences described herein, e.g. SEQ ID No:193, SEQ ID No:195, SEQ ID No:197, SEQ ID No:199, SEQ ID No:203, SEQ ID No:205, SEQ ID No:340, SEQ ID No:524, SEQ ID No:526, SEQ ID No:528, SEQ ID No:530, SEQ ID No:532 or SEQ ID No:534. Optionally, the VL domain is comprised by a light chain, wherein the light chain comprises any of the light chain constant region sequences described herein, e.g. SEQ ID Nos:207, 209, 211, 213, 215, 217, 219, 223, 225, 227, 229, 231, 233, 235, 237, 536 and 538.

[1526] KY11 is an anti-TIGIT antibody that comprises a heavy chain variable domain (VH) amino acid sequence of SEQ ID No:701 and a nucleic acid sequence encoding the VH domain is SEQ ID No:702. KY11 has a light chain variable domain (VL) amino acid sequence of SEQ ID No:703 and a nucleic acid sequence encoding the VL domain is SEQ ID No:704. Optionally, the VH domain is comprised by a heavy chain, wherein the heavy chain comprises any of the heavy chain constant region sequences described herein, e.g. SEQ ID No:193, SEQ ID No:195, SEQ ID No:197, SEQ ID No:199, SEQ ID No:203, SEQ ID No:205, SEQ ID No:340, SEQ ID No:524, SEQ ID No:526, SEQ ID No:528, SEQ ID No:530, SEQ ID No:532 or SEQ ID No:534. Optionally, the VL domain is comprised by a light chain, wherein the light chain comprises any of the light chain constant region sequences described herein, e.g. SEQ ID Nos:207, 209, 211, 213, 215, 217, 219, 223, 225, 227, 229, 231, 233, 235, 237, 536 and 538.

[1527] KY12 is an anti-TIGIT antibody that comprises a heavy chain variable domain (VH) amino acid sequence of SEQ ID No:705 and a nucleic acid sequence encoding the VH domain is SEQ ID No:706. KY12 has a light chain variable domain (VL) amino acid sequence of SEQ ID No:707 and a nucleic acid sequence encoding the VL domain is SEQ ID No:708. Optionally, the VH domain is comprised by a heavy chain, wherein the heavy chain comprises any of the heavy chain constant region sequences described herein, e.g. SEQ ID No:193, SEQ ID No:195, SEQ ID No:197, SEQ ID No:199, SEQ ID No:203, SEQ ID No:205, SEQ ID No:340, SEQ ID No:524, SEQ ID No:526, SEQ ID No:528, SEQ ID No:530, SEQ ID No:532 or SEQ ID No:534. Optionally, the VL domain is comprised by a light chain, wherein the light chain comprises any of the light chain constant region sequences described herein, e.g. SEQ ID Nos:207, 209, 211, 213, 215, 217, 219, 223, 225, 227, 229, 231, 233, 235, 237, 536 and 538.

[1528] KY13 is an anti-TIGIT antibody that comprises a heavy chain variable domain (VH) amino acid sequence of SEQ ID No:709 and a nucleic acid sequence encoding the VH domain is SEQ ID No:710. KY13 has a light chain variable domain (VL) amino acid sequence of SEQ ID No:711 and a nucleic acid sequence encoding the VL domain is SEQ ID No:712. Optionally, the VH domain is comprised by a heavy chain, wherein the heavy chain comprises any of the heavy chain constant region sequences described herein, e.g. SEQ ID No:193, SEQ ID No:195, SEQ ID No:197, SEQ ID No:199, SEQ ID No:203, SEQ ID No:205, SEQ ID No:340, SEQ ID No:524, SEQ ID No:526, SEQ ID No:528, SEQ ID No:530, SEQ ID No:532 or SEQ ID No:534. Optionally, the VL domain is comprised by a light chain, wherein the light chain comprises any of the light chain constant region sequences described herein, e.g. SEQ ID Nos:207, 209, 211, 213, 215, 217, 219, 223, 225, 227, 229, 231, 233, 235, 237, 536 and 538.

[1529] KY14 is an anti-TIGIT antibody that comprises a heavy chain variable domain (VH) amino acid sequence of SEQ ID No:713 and a nucleic acid sequence encoding the VH domain is SEQ ID No:714. KY14 has a light chain variable domain (VL) amino acid sequence of SEQ ID No:715 and a nucleic acid sequence encoding the VL domain is SEQ ID No:716. Optionally, the VH domain is comprised by a heavy chain, wherein the heavy chain comprises any of the heavy chain constant region sequences described herein, e.g. SEQ ID No:193, SEQ ID No:195, SEQ ID No:197, SEQ ID No:199, SEQ ID No:203, SEQ ID No:205, SEQ ID No:340, SEQ ID No:524, SEQ ID No:526, SEQ ID No:528, SEQ ID No:530, SEQ ID No:532 or SEQ ID No:534. Optionally, the VL domain is comprised by a light chain, wherein the light chain comprises any of the light chain constant region sequences described herein, e.g. SEQ ID Nos:207, 209, 211, 213, 215, 217, 219, 223, 225, 227, 229, 231, 233, 235, 237, 536 and 538.

[1530] KY15 is an anti-TIGIT antibody that comprises a heavy chain variable domain (VH) amino acid sequence of SEQ ID No:717 and a nucleic acid sequence encoding the VH domain is SEQ ID No:718. KY15 has a light chain variable domain (VL) amino acid sequence of SEQ ID No:719 and a nucleic acid sequence encoding the VL domain is SEQ ID No:720. Optionally, the VH domain is comprised by a heavy chain, wherein the heavy chain comprises any of the heavy chain constant region sequences described herein, e.g. SEQ ID No:193, SEQ ID No:195, SEQ ID No:197, SEQ ID No:199, SEQ ID No:203, SEQ ID No:205, SEQ ID No:340, SEQ ID No:524, SEQ ID No:526, SEQ ID No:528, SEQ ID No:530, SEQ ID No:532 or SEQ ID No:534. Optionally, the VL domain is comprised by a light chain, wherein the light chain comprises any of the light chain constant region sequences described herein, e.g. SEQ ID Nos:207, 209, 211, 213, 215, 217, 219, 223, 225, 227, 229, 231, 233, 235, 237, 536 and 538. In an alternative the antibody comprises the variable domain (VH) amino acid sequence of SEQ ID No:717 except wherein the sequence ends with VTVSS instead of VIVSS.

[1531] KY16 is an anti-TIGIT antibody that comprises a heavy chain variable domain (VH) amino acid sequence of SEQ ID No:721 and a nucleic acid sequence encoding the VH domain is SEQ ID No:722. KY16 has a light chain variable domain (VL) amino acid sequence of SEQ ID No:723 and a nucleic acid sequence encoding the VL domain is SEQ ID No:724. Optionally, the VH domain is comprised by a heavy chain, wherein the heavy chain comprises any of the heavy chain constant region sequences described herein, e.g. SEQ ID No:193, SEQ ID No:195, SEQ ID No:197, SEQ ID No:199, SEQ ID No:203, SEQ ID No:205, SEQ ID No:340, SEQ ID No:524, SEQ ID No:526, SEQ ID No:528, SEQ ID No:530, SEQ ID No:532 or SEQ ID No:534. Optionally, the VL domain is comprised by a light chain, wherein the light chain comprises any of the light chain constant region sequences described herein, e.g. SEQ ID Nos:207, 209, 211, 213, 215, 217, 219, 223, 225, 227, 229, 231, 233, 235, 237, 536 and 538.

[1532] KY17 is an anti-TIGIT antibody that comprises a heavy chain variable domain (VH) amino acid sequence of SEQ ID No:725 and a nucleic acid sequence encoding the VH domain is SEQ ID No:726. KY17 has a light chain variable domain (VL) amino acid sequence of SEQ ID No:727 and a nucleic acid sequence encoding the VL domain is SEQ ID No:728. Optionally, the VH domain is comprised by a heavy chain, wherein the heavy chain comprises any of the heavy chain constant region sequences described herein, e.g. SEQ ID No:193, SEQ ID No:195, SEQ ID No:197, SEQ ID No:199, SEQ ID No:203, SEQ ID No:205, SEQ ID No:340, SEQ ID No:524, SEQ ID No:526, SEQ ID No:528, SEQ ID No:530, SEQ ID No:532 or SEQ ID No:534. Optionally, the VL domain is comprised by a light chain, wherein the light chain comprises any of the light chain constant region sequences described herein, e.g. SEQ ID Nos:207, 209, 211, 213, 215, 217, 219, 223, 225, 227, 229, 231, 233, 235, 237, 536 and 538.

[1533] KY18 is an anti-TIGIT antibody that comprises a heavy chain variable domain (VH) amino acid sequence of SEQ ID No:729 and a nucleic acid sequence encoding the VH domain is SEQ ID No:730. KY18 has a light chain variable domain (VL) amino acid sequence of SEQ ID No:731 and a nucleic acid sequence encoding the VL domain is SEQ ID No:732. Optionally, the VH domain is comprised by a heavy chain, wherein the heavy chain comprises any of the heavy chain constant region sequences described herein, e.g. SEQ ID No:193, SEQ ID No:195, SEQ ID No:197, SEQ ID No:199, SEQ ID No:203, SEQ ID No:205, SEQ ID No:340, SEQ ID No:524, SEQ ID No:526, SEQ ID No:528, SEQ ID No:530, SEQ ID No:532 or SEQ ID No:534. Optionally, the VL domain is comprised by a light chain, wherein the light chain comprises any of the light chain constant region sequences described herein, e.g. SEQ ID Nos:207, 209, 211, 213, 215, 217, 219, 223, 225, 227, 229, 231, 233, 235, 237, 536 and 538.

[1534] KY19 is an anti-TIGIT antibody that comprises a heavy chain variable domain (VH) amino acid sequence of SEQ ID No:733 and a nucleic acid sequence encoding the VH domain is SEQ ID No:734. KY19 has a light chain variable domain (VL) amino acid sequence of SEQ ID No:735 and a nucleic acid sequence encoding the VL domain is SEQ ID No:736. Optionally, the VH domain is comprised by a heavy chain, wherein the heavy chain comprises any of the heavy chain constant region sequences described herein, e.g. SEQ ID No:193, SEQ ID No:195, SEQ ID No:197, SEQ ID No:199, SEQ ID No:203, SEQ ID No:205, SEQ ID No:340, SEQ ID No:524, SEQ ID No:526, SEQ ID No:528, SEQ ID No:530, SEQ ID No:532 or SEQ ID No:534. Optionally, the VL domain is comprised by a light chain, wherein the light chain comprises any of the light chain constant region sequences described herein, e.g. SEQ ID Nos:207, 209, 211, 213, 215, 217, 219, 223, 225, 227, 229, 231, 233, 235, 237, 536 and 538.

[1535] KY20 is an anti-TIGIT antibody that comprises a heavy chain variable domain (VH) amino acid sequence of SEQ ID No:737 and a nucleic acid sequence encoding the VH domain is SEQ ID No:738. KY20 has a light chain variable domain (VL) amino acid sequence of SEQ ID No:739 and a nucleic acid sequence encoding the VL domain is SEQ ID No:740. Optionally, the VH domain is comprised by a heavy chain, wherein the heavy chain comprises any of the heavy chain constant region sequences described herein, e.g. SEQ ID No:193, SEQ ID No:195, SEQ ID No:197, SEQ ID No:199, SEQ ID No:203, SEQ ID No:205, SEQ ID No:340, SEQ ID No:524, SEQ ID No:526, SEQ ID No:528, SEQ ID No:530, SEQ ID No:532 or SEQ ID No:534. Optionally, the VL domain is comprised by a light chain, wherein the light chain comprises any of the light chain constant region sequences described herein, e.g. SEQ ID Nos:207, 209, 211, 213, 215, 217, 219, 223, 225, 227, 229, 231, 233, 235, 237, 536 and 538.

[1536] KY21 is an anti-TIGIT antibody that comprises a heavy chain variable domain (VH) amino acid sequence of SEQ ID No:741 and a nucleic acid sequence encoding the VH domain is SEQ ID No:742. KY21 has a light chain variable domain (VL) amino acid sequence of SEQ ID No:743 and a nucleic acid sequence encoding the VL domain is SEQ ID No:744. Optionally, the VH domain is comprised by a heavy chain, wherein the heavy chain comprises any of the heavy chain constant region sequences described herein, e.g. SEQ ID No:193, SEQ ID No:195, SEQ ID No:197, SEQ ID No:199, SEQ ID No:203, SEQ ID No:205, SEQ ID No:340, SEQ ID No:524, SEQ ID No:526, SEQ ID No:528, SEQ ID No:530, SEQ ID No:532 or SEQ ID No:534. Optionally, the VL domain is comprised by a light chain, wherein the light chain comprises any of the light chain constant region sequences described herein, e.g. SEQ ID Nos:207, 209, 211, 213, 215, 217, 219, 223, 225, 227, 229, 231, 233, 235, 237, 536 and 538.

[1537] KY22 is an anti-TIGIT antibody that comprises a heavy chain variable domain (VH) amino acid sequence of SEQ ID No:745 and a nucleic acid sequence encoding the VH domain is SEQ ID No:746. KY22 has a light chain variable domain (VL) amino acid sequence of SEQ ID No:747 and a nucleic acid sequence encoding the VL domain is SEQ ID No:748. Optionally, the VH domain is comprised by a heavy chain, wherein the heavy chain comprises any of the heavy chain constant region sequences described herein, e.g. SEQ ID No:193, SEQ ID No:195, SEQ ID No:197, SEQ ID No:199, SEQ ID No:203, SEQ ID No:205, SEQ ID No:340, SEQ ID No:524, SEQ ID No:526, SEQ ID No:528, SEQ ID No:530, SEQ ID No:532 or SEQ ID No:534. Optionally, the VL domain is comprised by a light chain, wherein the light chain comprises any of the light chain constant region sequences described herein, e.g. SEQ ID Nos:207, 209, 211, 213, 215, 217, 219, 223, 225, 227, 229, 231, 233, 235, 237, 536 and 538.

[1538] KY23 is an anti-TIGIT antibody that comprises a heavy chain variable domain (VH) amino acid sequence of SEQ ID No:749 and a nucleic acid sequence encoding the VH domain is SEQ ID No:750. KY23 has a light chain variable domain (VL) amino acid sequence of SEQ ID No:751 and a nucleic acid sequence encoding the VL domain is SEQ ID No:752. Optionally, the VH domain is comprised by a heavy chain, wherein the heavy chain comprises any of the heavy chain constant region sequences described herein, e.g. SEQ ID No:193, SEQ ID No:195, SEQ ID No:197, SEQ ID No:199, SEQ ID No:203, SEQ ID No:205, SEQ ID No:340, SEQ ID No:524, SEQ ID No:526, SEQ ID No:528, SEQ ID No:530, SEQ ID No:532 or SEQ ID No:534. Optionally, the VL domain is comprised by a light chain, wherein the light chain comprises any of the light chain constant region sequences described herein, e.g. SEQ ID Nos:207, 209, 211, 213, 215, 217, 219, 223, 225, 227, 229, 231, 233, 235, 237, 536 and 538.

[1539] The anti-TIGIT antibodies of the invention are described with respect to the following Statements. Unless otherwise stated, all Statements are to be read as being able to be combined with any other concept, aspect, sentence, arrangement or embodiment herein, unless such combination would not make technical sense or is explicitly stated otherwise.

### Statements

[1540] 1. An antibody or fragment which specifically binds to TIGIT (T cell immunoreceptor with Ig and ITIM domains) and comprises a V_{H} domain which comprises a CDRH3 sequence selected from
   [1541] (c) SEQ ID NO: 599, 602, 619, 622, 639, 642, 659, 662 or said selected CDRH3 sequence comprising 3, 2 or 1 amino acid substitution(s); or
   [1542] (d) the CDRH3 sequence of an antibody selected from the group consisting of KY01-KY23, or wherein the CDRH3 sequence of said V_{H} domain comprises 3, 2 or 1 amino acid substitution(s) compared to the CDRH3 sequence of an antibody selected from the group consisting of KY01-KY23.

[1543] In an alternative, said group consists of KY01-KY04.

[1544] CDR sequences of anti-TIGIT antibodies and fragments may be according to Kabat or IMGT determination. In one embodiment, a CDR herein (eg, the CDRH3) is from 14 to 17, 18, 19, 20, 21 or 22 amino acids.

[1545] Optionally, the antibody or fragment of the invention neutralises TIGIT, eg, the antibody or fragment competes with 10A7 for binding to TIGIT and/or for inhibiting the binding of TIGIT to CD155.
[1546] 2. The antibody or fragment according to Statement 1, wherein
   [1547] (i) the V_{H} domain of the antibody or fragment comprises the CDRH3 sequence of SEQ ID NO:599 or SEQ ID NO:602 and respectively the CDRH1 sequence of SEQ ID NO:597 or SEQ ID NO:600, or the CDRH1 sequence of SEQ ID NO:597 or SEQ ID NO:600 comprising 3, 2 or 1 amino acid substitution(s);
   [1548] (ii) the V_{H} domain of the antibody or fragment comprises the CDRH3 sequence of SEQ ID NO:619 or SEQ ID NO:622 and respectively the CDRH1 sequence of SEQ ID NO:617 or SEQ ID NO:620, or the CDRH1 sequence of SEQ ID NO: 617 or SEQ ID NO:620 comprising 3, 2 or 1 amino acid substitution(s);
   [1549] (iii) the V_{H} domain of the antibody or fragment comprises the CDRH3 sequence of SEQ ID NO:639 or SEQ ID NO:642 and respectively the CDRH1 sequence of SEQ ID NO:637 or SEQ ID NO:640, or the CDRH1 sequence of SEQ ID NO:637 or SEQ ID NO:640 comprising 3, 2 or 1 amino acid substitution(s);
   [1550] (iv) the V_{H} domain of the antibody or fragment comprises the CDRH3 sequence of SEQ ID NO:659 or SEQ ID NO:662 and respectively the CDRH1 sequence of SEQ ID NO:657 or SEQ ID NO:660, or the CDRH1 sequence of SEQ ID NO:657 or SEQ ID NO:660 comprising 3, 2 or 1 amino acid substitution(s).

[1551] In an example, the V_{H} domain of the antibody or fragment comprises the CDRH3 and CDHR1 sequence of an antibody selected from the group consisting of KY01-KY23; or wherein the CDRH3 sequence of said V_{H} domain comprises 3, 2 or 1 amino acid substitution(s) compared to the CDRH3 sequence of an antibody selected from the group consisting of KY01-KY23 and/or the CDRH1 sequence of said V_{H} domain comprises 3, 2 or 1 amino acid substitution(s) compared to the CDRH1 sequence of the selected antibody.
[1552] 3. The antibody or fragment according to Statement 1 or Statement 2, wherein
   [1553] (v) the V_{H} domain of the antibody or fragment comprises the CDRH3 sequence of SEQ ID NO: 599 or SEQ ID NO:602 and respectively the CDRH2 sequence of SEQ ID NO:598 or SEQ ID NO:601, or the CDRH2 sequence of SEQ ID NO:598 or SEQ ID NO:601 comprising 3, 2 or 1 amino acid substitution(s);
   [1554] (vi) the V_{H} domain of the antibody or fragment comprises the CDRH3 sequence of SEQ ID NO:619 or SEQ ID NO:622 and respectively the CDRH2 sequence of SEQ ID NO:618 or SEQ ID NO:621, or the CDRH2 sequence of SEQ ID NO:618 or SEQ ID NO:621, comprising 3, 2 or 1 amino acid substitution(s);
   [1555] (vii) the V_{H} domain of the antibody or fragment comprises the CDRH3 sequence of SEQ ID NO:639 or SEQ ID NO:642 and respectively the CDRH2 sequence of SEQ ID NO:638 or SEQ ID NO:641, or the CDRH2 sequence of SEQ ID NO:638 or SEQ ID NO:641 comprising 3, 2 or 1 amino acid substitution(s);
   [1556] (viii) the V_{H} domain of the antibody or fragment comprises the CDRH3 sequence of SEQ ID NO:659 or SEQ ID NO:662 and respectively the CDRH2 sequence of SEQ ID NO:658 or SEQ ID NO:661, or the CDRH2 sequence of SEQ ID NO:658 or SEQ ID NO:661 comprising 3, 2 or 1 amino acid substitution(s).

[1557] In an example, the V_{H} domain of the antibody or fragment comprises the CDRH3 and CDHR2 sequences of an antibody selected from the group consisting of KY01-KY23; or wherein the CDRH3 sequence of said V_{H} domain comprises 3, 2 or 1 amino acid substitution(s) compared to the CDRH3 sequence of an antibody selected from the group consisting of KY01-KY23 and/or the CDRH2 sequence of said V_{H} domain comprises 3, 2 or 1 amino acid substitution(s) compared to the CDRH2 sequence of the selected antibody.

[1558] In an example, the V_{H} domain of the antibody or fragment comprises the CDRH1, CDHR2 and CDRH3 sequences of an antibody selected from the group consisting of KY01-KY23; or wherein the CDRH1 sequence of said V_{H} domain comprises 3, 2 or 1 amino acid substitution(s) compared to the CDRH1 sequence of an antibody selected from the group consisting of KY01-KY23 and/or the CDRH2 sequence of said V_{H} domain comprises 3, 2 or 1 amino acid substitution(s) compared to the CDRH2 sequence of the selected antibody and/or the CDRH3 sequence of said V_{H} domain comprises 3, 2 or 1 amino acid substitution(s) compared to the CDRH3 sequence of the selected antibody.

[1559] In an alternative, said group consists of KY01-KY04.
[1560] 4. The antibody or fragment according to any Statement 1, wherein
   [1561] (ix) the V_{H} domain of the antibody or fragment of comprises the amino acid sequence of SEQ ID NO:603, or a heavy chain variable domain amino acid sequence that is at least 85% identical to SEQ ID NO:603;
   [1562] (x) the V_{H} domain of the antibody or fragment of comprises the amino acid sequence of SEQ ID NO:623, or a heavy chain variable domain amino acid sequence that is at least 85% identical to SEQ ID NO:623;
   [1563] (xi) the V_{H} domain of the antibody or fragment of comprises the amino acid sequence of SEQ ID NO:643, or a heavy chain variable domain amino acid sequence that is at least 85% identical to SEQ ID NO:643;
   [1564] (xii) the V_{H} domain of the antibody or fragment of comprises the amino acid sequence of SEQ ID NO:663, or a heavy chain variable domain amino acid sequence that is at least 85% identical to SEQ ID NO:663.

[1565] Optionally, the V_{H} domain of the antibody or fragment of comprises the amino acid sequence of an antibody selected from the group consisting of KY01-KY23, or a heavy chain variable domain amino acid sequence that is at least 85% identical to the amino acid sequence of an antibody selected from the group consisting of KY01-KY23. In an alternative, said group consists of KY01-KY04.

[1566] Optionally, where an amino acid sequence (eg, a VH or VL sequence) is disclosed as being at least 85% identical to a specified SEQ ID or domain, alternatively one of the following applies:—

[1567] In one embodiment, the amino acid sequence is at least 70% identical to the specified SEQ ID NO (or domain). In one embodiment, the amino acid sequence is at least 75% identical to the specified SEQ ID NO (or domain). In one embodiment, the amino acid sequence is at least 95% identical to the specified SEQ ID NO (or domain). In one embodiment, the amino acid sequence is at least 96% identical to the specified SEQ ID NO (or domain). In one embodiment, the amino acid sequence is at least 97% identical to the specified SEQ ID NO (or domain). In one embodiment, the amino acid sequence is at least 98% identical to the specified SEQ ID NO (or domain). In one embodiment, the amino acid sequence is at least 99% identical to the specified SEQ ID NO (or domain). In one embodiment, the amino acid sequence is at least 99.5% identical to the specified SEQ ID NO (or domain). For example, the amino acid sequence is identical to the specified SEQ ID NO or the amino acid sequence of the domain.
[1568] 5. The antibody or fragment according to any preceding Statement comprising first and second copies of said V_{H} domain.

[1569] Optionally, each VH is paired with a VL and comprised by a VH/VL antigen-binding site of the antibody or fragment. In another example, the antibody is a H2 antibody wherein the VH is comprised by a binding site that specifically binds TIGIT and the binding site is devoid of a VL domain.
[1570] 6. The antibody or fragment according to any preceding Statement, wherein the antibody or fragment comprises a VL domain, wherein the VL domain comprises
   [1571] (I) the CDRL3 sequence of SEQ ID NO:609 or SEQ ID NO:612, or the CDRL3 sequence of SEQ ID NO: 609 or SEQ ID NO:612 comprising 3, 2 or 1 amino acid substitution(s), and optionally comprises a VH domain according to Statement 2(i) and/or 3(v); or according to Statement 4(ix);
   [1572] (II) the CDRL3 sequence of SEQ ID NO:629 or SEQ ID NO:632, or the CDRL3 sequence of SEQ ID NO:629 or SEQ ID NO:632 comprising 3, 2 or 1 amino acid substitution(s), and optionally comprises a VH domain according to Statement 2(ii) and/or 3(vi); or according to Statement 4(x);
   [1573] (III) the CDRL3 sequence of SEQ ID NO:649 or SEQ ID NO:652, or the CDRL3 sequence of SEQ ID NO:649 or SEQ ID NO:652 comprising 3, 2 or 1 amino acid substitution(s), and optionally comprises a V_{H} domain according to Statement 2(iii) and/or 3(vii); or according to Statement 4(xi);
   [1574] (IV) the CDRL3 sequence of SEQ ID NO:669 or SEQ ID NO:672, or the CDRL3 sequence of SEQ ID NO:669 or SEQ ID NO:672 comprising 3, 2 or 1 amino acid substitution(s), and optionally comprises a V_{H} domain according to Statement 2(iv) and/or 3(viii); or according to Statement 4(xii); or
      [1575] the CDRL1; CDRL2; CDRL3; CDRL1 and CDRL3; CDRL2 and CDRL3; or CDRL1, CDRL2 and CDRL3 sequences of an antibody selected from the group consisting of KY01-KY23, or wherein the or each CDRL sequence of said V_{L} domain comprises 3, 2 or 1 amino acid substitution(s) compared to the corresponding CDRL sequence of an antibody selected from the group consisting of KY01-KY23. Optionally additionally the antibody or fragment comprises a VH domain comprising the amino acid sequence of a VH domain of said selected antibody.

[1576] In an alternative, said group consists of KY01-KY04.

[1577] In an alternative, the LCDR3 is the LCDR3 of an anti-TIGIT antibody or VL domain disclosed herein.
[1578] 7. The antibody or fragment according to Statement 6, wherein
   [1579] (V) the V_{L} domain of (I) respectively comprises the CDRL1 sequence of SEQ ID NO:607 or SEQ ID NO:610, or the CDRL1 sequence of SEQ ID NO:607 or SEQ ID NO:610 comprising 3, 2 or 1 amino acid substitution(s);
   [1580] (VI) the V_{L} domain of (II) respectively comprises the CDRL1 sequence of SEQ ID NO:627 or SEQ ID NO:630, or the CDRL1 sequence of SEQ ID NO:627 or SEQ ID NO:630 comprising 3, 2 or 1 amino acid substitution(s);
   [1581] (VII) the V_{L} domain of (III) respectively comprises the CDRL1 sequence of SEQ ID NO:647 or SEQ ID NO:650, or the CDRL1 sequence of SEQ ID NO:647 or SEQ ID NO:650 comprising 3, 2 or 1 amino acid substitution(s);
   [1582] (VIII) the V_{L} domain of (IV) respectively comprises the CDRL1 sequence of SEQ ID NO:667 or SEQ ID NO:670, or the CDRL1 sequence of SEQ ID NO:667 or SEQ ID NO:670 comprising 3, 2 or 1 amino acid substitution(s).
[1583] 8. The antibody or fragment according to Statement 6 or 7, wherein
   [1584] (IX) the V_{L} domain of (I) respectively comprises the CDRL2 sequence of SEQ ID NO:608 or SEQ ID NO:611, or the CDRL2 sequence of SEQ ID NO:608 or SEQ ID NO:611 comprising 3, 2 or 1 amino acid substitution(s);
   [1585] (X) the V_{L} domain of (II) respectively comprises the CDRL2 sequence of SEQ ID NO:628 or SEQ IS NO:631, or the CDRL2 sequence of SEQ ID NO:628 or SEQ IS NO:631 comprising 3, 2 or 1 amino acid substitution(s);
   [1586] (XI) the V_{L} domain of (III) respectively comprises the CDRL2 sequence of SEQ ID NO:648 or SEQ ID NO:651, or the CDRL2 sequence of SEQ ID NO:648 or SEQ ID NO:651 comprising 3, 2 or 1 amino acid substitution(s);
   [1587] (XII) the V_{L} domain of (IV) respectively comprises the CDRL2 sequence of SEQ ID NO:668 or SEQ ID NO:671, or the CDRL2 sequence of SEQ ID NO:668 or SEQ ID NO:671 comprising 3, 2 or 1 amino acid substitution(s).

[1588] In an example, the V_{L} domain of the antibody or fragment comprises the CDRL3 and CDHR1 sequence of an antibody selected from the group consisting of KY01-KY23; or wherein the CDRL3 sequence of said V_{L} domain comprises 3, 2 or 1 amino acid substitution(s) compared to the CDRL3 sequence of an antibody selected from the group consisting of KY01-KY23 and/or the CDRL1 sequence of said V_{L} domain comprises 3, 2 or 1 amino acid substitution(s) compared to the CDRL1 sequence of the selected antibody.

[1589] In an example, the V_{L} domain of the antibody or fragment comprises the CDRL3 and CDHR2 sequence of an antibody selected from the group consisting of KY01-KY23; or wherein the CDRL3 sequence of said V_{L} domain comprises 3, 2 or 1 amino acid substitution(s) compared to the CDRL3 sequence of an antibody selected from the group consisting of KY01-KY23 and/or the CDRL2 sequence of said V_{L} domain comprises 3, 2 or 1 amino acid substitution(s) compared to the CDRL2 sequence of the selected antibody.

[1590] In an example, the V_{L} domain of the antibody or fragment comprises the CDRL1, CDRL2 and CDHR3 sequence of an antibody selected from the group consisting of KY01-KY23; or wherein the CDRL1 sequence of said VL domain comprises 3, 2 or 1 amino acid substitution(s) compared to the CDRL1 sequence of an antibody selected from the group consisting of KY01-KY23 and/or the CDRL2 sequence of said VL domain comprises 3, 2 or 1 amino acid substitution(s) compared to the CDRL2 sequence of the selected antibody and/or the CDRL3 sequence of said VL domain comprises 3, 2 or 1 amino acid substitution(s) compared to the CDRL3 sequence of the selected antibody.
[1591] 9. The antibody or fragment according to any preceding Statement, wherein the antibody or fragment comprises a VL domain, wherein the VL domain comprises
   [1592] (XIII) the amino acid sequence of SEQ ID NO:613, or a light chain variable domain amino acid sequence that is at least 85% identical to SEQ ID NO:613;
   [1593] (XIV) the amino acid sequence of SEQ ID NO:633, or a light chain variable domain amino acid sequence that is at least 85% identical to SEQ ID NO:633;
   [1594] (XV) the amino acid sequence of SEQ ID NO:653, or a light chain variable domain amino acid sequence that is at least 85% identical to SEQ ID NO:653;
   [1595] (XVI) the amino acid sequence of SEQ ID NO:673, or a light chain variable domain amino acid sequence that is at least 85% identical to SEQ ID NO:673; or
      [1596] the amino acid sequence of a VL domain of an antibody selected from the group consisting of KY01-KY23, or a light chain variable domain amino acid sequence that is at least 85% identical to the amino acid sequence of a VL domain of an antibody selected from the group consisting of KY01-KY23.
[1597] 10. The antibody or fragment according to any one of Statements 6 to 9 comprising first and second copies of said VL domain.

[1598] In an example the antibody comprises first (and optionally a second) anti-TIGIT binding site, wherein the or each binding site comprises a said VH domain paired with a said VL domain.

[1599] In an alternative, there is provided:—

[1600] An antibody or fragment which specifically binds to TIGIT and comprises a VL domain as recited in any one of Statements 6 to 9, optionally wherein the antibody or fragment comprises a VH domain, wherein the VH domain is a VH domain of an anti-TIGIT antibody or VH domain disclosed herein or wherein the VH domain comprises a HCDR3 of an anti-TIGIT antibody or VH domain disclosed herein.

[1601] In an alternative, the antibody or fragment comprises a VL domain of an anti-TIGIT antibody or VL domain disclosed herein.

[1602] In an example, the anti-TIGIT antibody or fragment comprises an anti-TIGIT binding site comprising a VH disclosed herein (or a VH of an anti-TIGIT antibody disclosed herein). In an example, the antibody or fragment comprises an anti-TIGIT binding site comprising a VL disclosed herein (or a VL of an anti-TIGIT antibody disclosed herein).
[1603] 11. An antibody or fragment (optionally according to any preceding Statement), comprising one or more TIGIT binding sites, wherein each binding site specifically binds to TIGIT and comprises a VH domain and a VL domain, wherein
   [1604] (a) The VH domain is according to Statement 4(ix) and the VL domain is according to Statement 9 (XIII);
   [1605] (b) The VH domain is according to Statement 4(x) and the VL domain is according to Statement 9 (XIV);
   [1606] (c) The VH domain is according to Statement 4(xi) and the VL domain is according to Statement 9 (XV);
   [1607] (d) The VH domain is according to Statement 4(xii) and the VL domain is according to Statement 9 (XVI);
   [1608] (e) Optionally, wherein the VH domain is comprised by an antibody heavy chain, the heavy chain comprising a constant region, wherein the constant region is a human IgG1 or IgG4 constant region; and the VL domain is comprised by an antibody light chain, the light chain comprising a human kappa or lambda constant region.

[1609] In an example, the antibody comprises a heavy chain comprising a constant region and a light chain comprising a constant region (eg, two heavy chains and two light chains, wherein each heavy chain is paired with a respective light chain). In an example, the human heavy constant region is a human gamma-1 and the light chain constant region is a human kappa constant region. In an example, the human heavy constant region is a human gamma-4 and the light chain constant region is a human kappa constant region. In an example, the human heavy constant region is a human gamma-1 and the light chain constant region is a human lambda constant region. In an example, the human heavy constant region is a human gamma-4 and the light chain constant region is a human lambda constant region.

[1610] In an example, the antibody, fragment or ICK (see anti-TIGIT immunocytokines disclosed herein) comprises a light chain comprising said anti-TIGIT VL and a kappa or lambda constant region. Kappa light chain constant region amino acid and nucleotide sequences can be found in SEQ ID Nos: 206 to 215. In one embodiment, the light chain may be a lambda light chain. Lambda light chain constant region amino acid and nucleotide sequences can be found in SEQ ID Nos: 216 to 237 and SEQ ID No: 535, SEQ ID No:536 and SEQ ID No:538.
[1611] 12. The antibody or fragment according to any preceding Statement, wherein the amino acid substitutions are conservative amino acid substitutions, optionally wherein each conservative substitutions is from group (1) to (6):
   [1612] 1) Alanine (A), Serine (S), Threonine (T);
   [1613] 2) Aspartic acid (D), Glutamic acid (E);
   [1614] 3) Asparagine (N), Glutamine (Q);
   [1615] 4) Arginine (R), Lysine (K);
   [1616] 5) Isoleucine (I), Leucine (L), Methionine (M), Valine (V); and
   [1617] 6) Phenylalanine (F), Tyrosine (Y), Tryptophan (W).

[1618] Each group contains amino acids that are conservative substitutions for one another.

[1619] Amino acid substitutions include alterations in which an amino acid is replaced with a different naturally-occurring amino acid residue. Such substitutions may be classified as “conservative”, in which case an amino acid residue contained in a polypeptide is replaced with another naturally occurring amino acid of similar character either in relation to polarity, side chain functionality or size. Such conservative substitutions are well known in the art. Substitutions encompassed by the present invention may also be “non-conservative”, in which an amino acid residue which is present in a peptide is substituted with an amino acid having different properties, such as naturally-occurring amino acid from a different group (e.g. substituting a charged or hydrophobic amino; acid with alanine), or alternatively, in which a naturally-occurring amino acid is substituted with a non-conventional amino acid.

[1620] In one embodiment, the conservative amino acid substitutions are as described herein. For example, the substitution may be of Y with F, T with S or K, P with A, E with D or Q, N with D or G, R with K, G with N or A, T with S or K, D with N or E, I with L or V, F with Y, S with T or A, R with K, G with N or A, K with R, A with S, K or P. In another embodiment, the conservative amino acid substitutions may be wherein Y is substituted with F, T with A or S, I with L or V, W with Y, M with L, N with D, G with A, T with A or S, D with N, I with L or V, F with Y or L, S with A or T and A with S, G, T or V.
[1621] 13. An antibody or fragment thereof which specifically binds to an epitope that is identical to an epitope to which the antibody of Statement 11 binds, or to which any antibody selected from the group consisting of KY01-KY23 (eg, KY01-KY04) specifically binds.

[1622] In one embodiment, the antibody or fragment thereof specifically binds to an epitope that is identical to an epitope to which a reference anti-TIGIT antibody binds, wherein the reference antibody is any one of the anti-TIGIT antibodies selected from KY01-KY23 (eg, KY01-KY04) or the antibody comprises a TIGIT antigen-binding site that comprises the CDRH1, CDRH2, CDRH3, CDRL1, CDRL2 and CDRL3, or the VH, or the VL or the VH and VL domain(s) from RG-6058 (MTIG-7192A), or CASC-TIGIT, or COM-902, or OMP-313M32, or AB-154, or BMS-986207 (ONO-4686), or 313R12, or 313R19, or 313M32, or 741182 (MAB7898) (R & D Systems), or MBSA43 (Affymetrix eBioscience), or 1G9 ab136311 or ab107664 (Abcam), or from any one of the anti-TIGIT antibodies described in WO2017/053748 & US2017/0088613 (including 1A4, 1D3, 4A3, 10A7, 4.1D3.Q1E, 4.1D3, 1A5, h10A7.K4G3, 4.1D3 and the other antibodies described in Examples 1 and 2), WO2017/037707 (including VSIG9#1 and 258-csl #4), WO2017/030823 (including 14D7, 26610 and humanized versions in Example 3), WO2016/191643 & US2016/0376365 (including 313RM, 313Rb2, 313Rb1, 313M32, 313M26, 313M34, 313M33, 313R11, 313R12, 313R13, 313R14, 313R19, 313R20, ATCC PTA-122180 and ATCC PTA-122181), WO2016/106302 & US2016/176963 (including 1462, 13E6, 6F9, 11G11, 10C9, 16F6, 11C9, 27A9, 10D7, 20G6, 24E8, 24G1, 27F1, 15A6, 4E4, 13D1, 9B11, 10B8, 22G2, 19H2, 8C8, 17G4, 25E7, 26D8 and 16A8), WO2016/028656 (including 14A6, 28H5 or 31C6 and humanized versions from Example 6), WO2006/124667 & US2007/054360 & US2009/156495 & US2010/316646 & US2012/219540 & US2015/0152160 & US2016/185863 (including 318.4.1.1, 318.28.2.1, 318.39.1.1, 318.59.3.1, 318.77.1.10), WO2015/143343 & US2017/107300 (including 4D4), and WO2009/126688 & US2009/0258013 & US2013/0251720 (U.S. Pat. No. 9,499,596) & US2017/0145093 (including 10A7 and 1F4); the sequences and features of the anti-TIGIT antibodies are incorporated herein by reference, or the reference antibody is any one of said antibodies.

[1623] In one embodiment, the reference antibody is 10A7 (US2013/0251720 discloses 10A7, the sequences of which are disclosed herein by reference).

[1624] The invention also provides:—
[1625] An anti-TIGIT antibody or fragment thereof which specifically binds to an epitope that is identical to an epitope to which the antibody KY01 specifically binds.
[1626] An anti-TIGIT antibody or fragment thereof which specifically binds to an epitope that is identical to an epitope to which the antibody KY02 specifically binds.
[1627] An anti-TIGIT antibody or fragment thereof which specifically binds to an epitope that is identical to an epitope to which the antibody KY03 specifically binds.
[1628] An anti-TIGIT antibody or fragment thereof which specifically binds to an epitope that is identical to an epitope to which the antibody KY04 specifically binds.
[1629] An anti-TIGIT antibody or fragment which competes for binding to human TIGIT with the antibody KY01.
[1630] An anti-TIGIT antibody or fragment which competes for binding to human TIGIT with the antibody KY02.
[1631] An anti-TIGIT antibody or fragment which competes for binding to human TIGIT with the antibody KY03.
[1632] An anti-TIGIT antibody or fragment which competes for binding to human TIGIT with the antibody KY04.

[1633] In one embodiment, there is provided an antibody which specifically binds to an epitope which is substantially similar to an epitope to which any of KY01-04 binds.
[1634] 14. The antibody or fragment according to Statement 13, wherein the epitope is identified by unrelated amino acid scanning, or by X-ray crystallography.

[1635] Contact amino acid residues involved in the interaction of antibody and antigen may be determined by various known methods to those skilled in the art.

[1636] In one embodiment, sequential replacement of the amino acids of the antigen sequence (using standard molecular biology techniques to mutate the DNA of the coding sequence of the antigen), in this case TIGIT with Alanine (a.k.a Alanine scan), or another unrelated amino acid, may provide residues whose mutation would reduce or ablate the ability of the antibody to recognise the antigen in question. Binding may be assessed using standard techniques, such as, but not limited to, SPR, HTRF, ELISA (which are described elsewhere herein). Other substitutions could be made to enhance the disruption of binding such as changing the charge on the side chain of antigen sequence amino acids (e.g. Lysine change to glutamic acid), switching polar and non-polar residues (e.g. Serine change to leucine). The alanine scan or other amino substitution method may be carried out either with recombinant soluble antigen, or where the target is a cell membrane target, directly on cells using transient or stable expression of the mutated versions.

[1637] In one embodiment, protein crystallography may be used to determine contact residues between antibody and antigen (i.e. to determine the epitope to which the antibody binds), crystallography allows the direct visualisation of contact residues involved in the antibody-antigen interaction. As well as standard X-ray crystallography, cryo-electro microscopy has been used to determine contact residues between antibodies and HIV capsid protein (see Lee, Jeong Hyun, et al. “Antibodies to a conformational epitope on gp41 neutralize HIV-1 by destabilizing the Env spike.”, Nature communications, 6, (2015)).

[1638] In one embodiment, if the antibody recognises a linear epitope, short peptides based on the antigen sequence can be produced and binding of the antibody to these peptides can be assessed using standard techniques, such as, but not limited to, SPR, HTRF, ELISA (which are described elsewhere herein). Further investigation of the epitope could be provided by performing an Alanine scan on any peptides that show binding. Alternative to linear peptides, conformational scans could be carried out using Pepscan technology (http://www.pepscan.com/) using their chemical linkage of peptides onto scaffolds, which has been used to determine discontinuous epitopes on CD20 targeting antibodies (Niederfellner, Gerhard, et al. “Epitope characterization and crystal structure of GA101 provide insights into the molecular basis for type I/II distinction of CD20 antibodies.”, Blood, 118.2, (2011), 358-367.).

[1639] In one embodiment, limited proteolytic digestion and mass spectrophotometry can be used to identify binding epitopes. The antibody-antigen complex is digested by a protease, such as, but not limited to, trypsin. The digested complex peptides are compared to antibody-alone and antigen-alone digestion mass spectrophotometry to determine if a particular epitope is protected by the complexation. Further work involving amino acid substitution, competition binding, may then be employed to narrow down to individual amino acid residues involved in the interaction (see, for example, Suckau, Detlev, et al. “Molecular epitope identification by limited proteolysis of an immobilized antigen-antibody complex and mass spectrometric peptide mapping.”, Proceedings of the National Academy of Sciences, 87.24, (1990), 9848-9852).

[1640] Thus, in one embodiment, the contact residues of the epitope are identified with an unrelated amino acid scan (e.g. alanine scan). In another embodiment, an unrelated amino acid scan (e.g. alanine scan) is carried out using a technique selected from SPR, HTRF, ELISA, X-ray crystallography, cryo-electro microscopy and a combination of limited proteolytic digestion and mass spectrometry. In one embodiment, the unrelated amino acid scan (e.g. alanine scan) is carried out using HTRF. In one embodiment, the unrelated amino acid scan (e.g. alanine scan) is carried out using ELISA.

[1641] When the alanine scan is carried out with either ELISA or HTRF, an amino acid residue is identified as contributing to the epitope if the reduction in signal is at least 25%. In one embodiment, the reduction in signal is at least 30%. In one embodiment, the reduction in signal is at least 35%. In one embodiment, the reduction in signal is at least 40%. In one embodiment, the reduction in signal is at least 45%. In one embodiment, the reduction in signal is at least 50%. In one embodiment, the reduction in signal is at least 55%. In one embodiment, the reduction in signal is at least 60%. In one embodiment, the reduction in signal is at least 70%. In one embodiment, the reduction in signal is at least 75%. In one embodiment, the reduction in signal is at least 80%. In one embodiment, the reduction in signal is at least 85%. In one embodiment, the reduction in signal is at least 90%.

[1642] When the alanine scan is carried out with SPR, an amino acid residue is identified as contributing to the epitope if there is at least a 10-fold reduction in affinity. In one embodiment, the reduction in affinity is at least 15-fold. In one embodiment, the reduction in affinity is at least 20-fold. In one embodiment, the reduction in affinity is at least 30-fold. In one embodiment, the reduction in affinity is at least 40-fold. In one embodiment, the reduction in affinity is at least 50-fold. In one embodiment, the reduction in affinity is at least 100-fold.

[1643] In one embodiment, the contact residues of the epitope are identified by X-ray crystallography. In one embodiment, the contact residues of the epitope are identified by cryo-electro microscopy. In one embodiment, the contact residues of the epitope are identified by a combination of limited proteolytic digestion and mass spectrometry.
[1644] 15. The antibody or fragment according to Statement 14, wherein the contact residues of the epitope are defined by a reduction in affinity of at least 10-fold in an unrelated amino acid scan, e.g. an alanine scan as determined by SPR.

[1645] In one embodiment, the reduction in affinity is at least 15-fold. In one embodiment, the reduction in affinity is at least 20-fold. In one embodiment, the reduction in affinity is at least 30-fold. In one embodiment, the reduction in affinity is at least 40-fold. In one embodiment, the reduction in affinity is at least 50-fold. In one embodiment, the reduction in affinity is at least 100-fold.

[1646] SPR may be carried out as described hereinabove.
[1647] 16. An antibody or fragment thereof which competes for binding to human TIGIT with the antibody of Statement 11 or another reference antibody as discussed under Statement 13, eg, KY01, 02, 03 or 04.

[1648] In an example, the human TIGIT comprises SEQ ID NO: 540 or 544. In an example, the hTIGIT is isoform 2. In an example, the hTIGIT is encoded by a nucleotide sequence that is identical to, or at least 90% identical to, SEQ ID NO: 541, 542 or 543.

[1649] In one embodiment, the antibody or fragment competes (e.g. in a dose-dependent manner) with hTIGIT (or a fusion protein thereof) for binding to cell surface-expressed hTIGIT. In one embodiment, the antibody or fragment competes (e.g. in a dose-dependent manner) with hTIGIT (or a fusion protein thereof) for binding to soluble hTIGIT.

[1650] Optionally, the competition for binding to hTIGIT is conducted using SPR. SPR may be carried out as described hereinabove.
[1651] 17. An antibody or a fragment thereof which comprises a binding site comprising a VH domain and a VL domain, wherein the binding site specifically binds TIGIT, and wherein
   [1652] c) the VH domain is encoded by a nucleotide sequence that is derived from the recombination of a human VH gene segment, DH gene segment and JH gene segment, wherein the VH gene segment is selected from IGHV3-11, IGHV3-15, IGHV3-20, IGHV3-9 and IGHV4-4; and
   [1653] d) the VL domain is encoded by a nucleotide sequence that is derived from the recombination of a human VL gene segment and JL gene segment, wherein the VL gene segment is selected from IGKV1-39, IGKV1D-39, IGKV1-5, IGLV3-1, IGKV2-28 and IGLV3-10; and
   [1654] e) optionally the antibody or fragment is according to any preceding Statement.

[1655] In an alternative, the human VH gene segment is a IGHV3 or IGHV4 gene segment. In an example, the VH is IGHV3-9 and the VL is IGKV2-28. In an example, the VH is IGHV3-15 and the VL is IGLV3-1. In an example, the VH is IGHV3-11 and the VL is IGKV1-39 or IGKV1D-39. In an example, the VH is IGHV3-11 and the VL is IGKV1-5. In an example, the VH is IGHV3-20 and the VL is IGKV1-39 or IGKV1D-39.

[1656] For example, the VH gene segment is selected from IGHV3-11*01, IGHV3-15*01, IGHV3-20*01, IGHV3-9*01 and IGHV4-4*02.

[1657] For example, the VL is selected from IGKV1-39*01, IGKV1D-39*01, IGKV1-5*03, IGLV3-1*01, IGKV2-28*01 and IGLV3-10*01.

[1658] In an alternative, the human V_{L} gene segment is a IGKV1, IGKV1D, IGLV3 or IGKV2 gene segment.
[1659] 18. The antibody or fragment according to Statement 17, wherein the DH gene segment is a human gene segment selected from IGHD3-10, IGHD3-9, IGHD6-13, IGHD6-19, IGHD1-14, IGHD2-21, IGHD4-17 and IGHD4-23.

[1660] In an example, the DH gene segment is selected from IGHD3-10*01, IGHD3-9*01, IGHD6-13*01, IGHD6-19*01, IGHD1-14*01, IGHD2-21*02, IGHD4-17*01 and IGHD4-23*01.
[1661] 19. The antibody or fragment according to Statement 17 or 18, wherein the JH gene segment is a human gene segment selected from IGHJ4, IGHJ5 and IGHJ6.

[1662] In an example, the JH gene segment is selected from IGHJ4*02, IGHJ5*02 and IGHJ6*02.
[1663] 20. The antibody or fragment according to Statement 17, 18 or 19, wherein the VL is a Vκ and the JL gene segment is a human gene segment selected from IGKJ2*04 and IGKJ4*01; or the VL is a Vλ and the JL gene segment is a human gene segment selected from IGLJ1*01, IGLJ2*01 and IGLJ3*02.

[1664] In an example, the VL is a Vκ and the JL gene segment is selected from IGKJ2*04 and IGKJ4*01; or the V_{L} is a Vλ and the JL gene segment is selected from IGLJ1*01, IGLJ2*01 and IGLJ3*02.
[1665] 21. The antibody or fragment according to any preceding Statement which specifically binds to a human TIGIT comprising SEQ ID NO: 540 or 544; and/or cynomolgus TIGIT comprising SEQ ID NO: 547 or 549; and/or a mouse TIGIT comprising SEQ ID NO: 556 or 559.

[1666] In an example, the antibody, fragment or ICK herein specifically binds to a human TIGIT comprising SEQ ID NO: 540. In an example, the antibody, fragment or ICK herein specifically binds to a human TIGIT comprising SEQ ID NO: 544.

[1667] In an example, TIGIT herein is a human, mouse or cynomolgus monkey TIGIT.

[1668] In one embodiment, the antibody or fragment binds to cynomolgus TIGIT with an affinity of less than 1 nM (e.g. from 1 nM to 0.01 pM or from 1 nM to 0.1 pM, or from 1 nM to 1 pM). In one embodiment, the antibody or fragment binds to cynomolgus TIGIT with an affinity of less than 10 nM (e.g. from 10 nM to 0.01 pM or from 10 nM to 0.1 pM, or from 10 nM to 1 pM). In one embodiment, the antibody or fragment binds to cynomolgus TIGIT with an affinity of less than 0.1 nM (e.g. from 0.1 nM to 0.01 pM or from 0.1 nM to 0.1 pM, or from 0.1 nM to 1 pM). In one embodiment, the antibody or fragment binds to cynomolgus TIGIT with an affinity of less than 0.01 nM (e.g. from 0.011 nM to 0.01 pM or from 0.01 nM to 0.1 pM).

[1669] In one embodiment, the antibody or fragment binds to cynomolgus TIGIT with an affinity of within 2-fold of the affinity to hTIGIT. In one embodiment, the antibody or fragment binds to cynomolgus TIGIT with an affinity of within 4-fold of the affinity to hTIGIT. In one embodiment, the antibody or fragment binds to cynomolgus TIGIT with an affinity of within 5-fold of the affinity to hTIGIT. In one embodiment, the antibody or fragment binds to cynomolgus TIGIT with an affinity of within 6-fold of the affinity to hTIGIT. In one embodiment, the antibody or fragment binds to cynomolgus TIGIT with an affinity of within 8-fold of the affinity to hTIGIT. In one embodiment, the antibody or fragment binds to cynomolgus TIGIT with an affinity of within 10-fold of the affinity to hTIGIT.

[1670] “hTIGIT” herein is a human TIGIT, eg, a human TIGIT disclosed herein, eg, comprising SEQ ID NO: 540 or 544.

[1671] In one embodiment, the antibody or fragment does not detectably bind to cynomolgus TIGIT. In one embodiment, the antibody or fragment does not detectably bind to murine (eg, mouse and/or rat) TIGIT.

[1672] In one embodiment, the antibody or fragment binds to murine (eg, mouse and/or rat) TIGIT with an affinity of less than 1 nM (e.g. from 1 nM to 0.01 pM or from 1 nM to 0.1 pM, or from 1 nM to 1 pM). In one embodiment, the antibody or fragment binds to murine TIGIT with an affinity of less than 10 nM (e.g. from 10 nM to 0.01 pM or from 10 nM to 0.1 pM, or from 10 nM to 1 pM). In one embodiment, the antibody or fragment binds to murine TIGIT with an affinity of less than 0.1 nM (e.g. from 0.1 nM to 0.01 pM or from 0.1 nM to 0.1 pM, or from 0.1 nM to 1 pM). In one embodiment, the antibody or fragment binds to murine TIGIT with an affinity of less than 0.01 nM (e.g. from 0.011 nM to 0.01 pM or from 0.01 nM to 0.1 pM).
[1673] 22. The antibody or fragment according to any preceding Statement, wherein the antibody or fragment comprises a human constant region, e.g. an IgG4 constant region or an IgG1 constant region.

[1674] Optionally, the antibody or fragment comprises a constant region, such as a human constant region, for example an effector-null human constant region, e.g. an IgG4 constant region or an IgG1 constant region, optionally wherein the constant region is IgG4-PE (SEQ ID NO:199), or a disabled IgG1 as defined in SEQ ID NO:205. Optionally, the antibody or fragment comprises a murine (eg, mouse and/or rat) constant region. Optionally, the antibody or fragment comprises any of the heavy chain constant region sequences described herein, e.g. SEQ ID No:193, SEQ ID No:195, SEQ ID No:197, SEQ ID No:199, SEQ ID No:203, SEQ ID No:205, SEQ ID No:340, SEQ ID No:524, SEQ ID No:526, SEQ ID No:528, SEQ ID No:530, SEQ ID No:532 or SEQ ID No:534 and/or any of the light chain constant region sequences described herein, e.g. SEQ ID Nos:207, 209, 211, 213, 215, 217, 219, 223, 225, 227, 229, 231, 233, 235, 237, 536 and 538.
[1675] 23. The antibody or fragment according to Statement 22, wherein the constant region has CDC and/or ADCC activity.
[1676] 24. The antibody or fragment according to any preceding Statement (eg, a bispecific antibody), further comprising an antigen-binding site that specifically binds another target antigen (eg, human PD-L1 or human ICOS) or binds TIGIT.; or wherein the antigen-binding site is a binding site of an antibody selected from 1D05, 84G09, 413G05, 416E01, STIM003 and STIM001.

[1677] In an example, the another target antigen-binding site is a binding site of 1D05.

[1678] In an example, the another target antigen-binding site is a binding site of 84G09.

[1679] In an example, the another target antigen-binding site is a binding site of STIM003.

[1680] Optionally, the another target antigen is an immune checkpoint inhibitor, eg, any immune checkpoint inhibitor disclosed herein, such as hPD-L1 or hICOS. In an example, the another target binding site is an antibody binding site comprising a VH and a VL; a binding site comprised by a constant domain of the antibody (eg, an Fcab binding site) or a non-immunoglobulin binding site (eg, an fibronectin domain). The another target antigen can be any such antigen described herein for antibodies, fragments etc comprising an anti-PD-L1 binding site and these disclosures are applicable mutatis mutandis to the present anti-TIGIT antibodies, fragments and ICKs. For example, the another target antigen is selected from immune checkpoint inhibitors (such as PD-1, CTLA-4, TIGIT, TIM-3, LAG-3 and VISTA, e.g. TIGIT, TIM-3 and LAG-3), immune modulators (such as BTLA, hHVEM, CSF1R, CCR4, CD39, CD40, CD73, CD96, CXCR2, CXCR4, CD200, GARP, SIRPα, CXCL9, CXCL10, CXCL11 and CD155, e.g. GARP, SIRPα, CXCR4, BTLA, hVEM and CSF1R), immune activators (such as CD137, GITR, OX40, CD40, CXCR3 (e.g. agonistic anti-CXCR3 antibodies), CD27, CD3, ICOS (e.g. agonistic anti-ICOS antibodies), for example. ICOS, CD137, GITR and OX40).

[1681] In another embodiment, the antibody binds another target antigen which is PD-1 and the binding to PD-1 is provided by an antigen-binding domain (for example, a V_{H}, a V_{L} or a paired V_{H} and V_{L}) having any of the sequences, eg, CDR sequences (for example CDRH3 and/or CDRL3) or variable region sequences as described in Aspect 1A. In another embodiment, the antibody binds another target antigen which is PD-L1 and the binding to PD-L1 is provided by an antigen-binding domain (for example, a V_{H}, a V_{L} or a paired V_{H} and V_{L}) having any of the sequences, eg, CDR sequences (for example CDRH3 and/or CDRL3) or variable region sequences or comprised by or according to any of the anti-PD-L1 antibodies as described herein (eg, comprises the anti-PD-L1 binding sites of 1D05, 84G09, 413G05 or 416E01, preferably 1D05).

[1682] In an example, the antibody, fragment, ICK or fusion protein comprises an anti-TIGIT binding site comprising VH and VL domains of KY01, KY02, KY03 or KY04; and an anti-PD-L1 binding site comprising VH and VL domains of 1D05, 84G09, 413G05 or 416E01, preferably 1D05. For example, the antibody, fragment, ICK or fusion protein comprises an anti-TIGIT binding site comprising VH and VL domains of KY01; and an anti-PD-L1 binding site comprising VH and VL domains of 1D05. For example, the antibody, fragment, ICK or fusion protein comprises an anti-TIGIT binding site comprising VH and VL domains of KY02; and an anti-PD-L1 binding site comprising VH and VL domains of 1D05. For example, the antibody, fragment, ICK or fusion protein comprises an anti-TIGIT binding site comprising VH and VL domains of KY03; and an anti-PD-L1 binding site comprising VH and VL domains of 1D05. For example, the antibody, fragment, ICK or fusion protein comprises an anti-TIGIT binding site comprising VH and VL domains of KY04; and an anti-PD-L1 binding site comprising VH and VL domains of 1D05. In one embodiment, the PD-L1 antigen-binding site comprises the CDRH1, CDRH2, CDR3, CDRL1, CDRL2 and CDRL3, or the VH, or the VL or the VH and VL region from any one of the anti-PD-L1 antibodies selected from atezolizumab (Roche), avelumab (Merck), BMS-936559/MDX-1105 (BMS), durvalumab/Medi4736 (Medimmune), KN-035, CA-170, FAZ-053 M7824, ABBV-368, LY-3300054, GNS-1480, YW243.55.S70, REGN3504 and any of the PD-L1 antibodies disclosed in WO2017/034916, WO2017/020291, WO2017/020858, WO2017/020801, WO2016/111645, WO2016/197367, WO2016/061142, WO2016/149201, WO2016/000619, WO2016/160792, WO2016/022630, WO2016/007235, WO2015/179654, WO2015/173267, WO2015/181342, WO2015/109124, WO2015/112805, WO2015/061668, WO2014/159562, WO2014/165082, WO2014/100079, WO2014/055897, WO2013/181634, WO2013/173223, WO2013/079174, WO2012/145493, WO2011/066389, WO2010/077634, WO2010/036959, WO2010/089411 or WO2007/005874, which antibodies and sequences are incorporated herein by reference.

[1683] In an example, the invention provides a multi-specific (eg, bispecific) antibody or combination of antibodies comprising a first binding site that specifically binds to TIGIT (eg, hTIGIT) and a second binding site that specifically binds to PD-L1 (eg, hPD-L1). Optionally, each binding site is an antibody binding site. Optionally, a bispecific antibody as defined herein is provided. Optionally, a kit or pharmaceutical composition comprising an anti-TIGIT antibody and an anti-PD-L1 antibody is provided. Optionally, the TIGIT binding site is a binding site of any anti-TIGIT antibody disclosed herein, eg, any of KY01-23 or the TIGIT antigen-binding site comprises the CDRH1, CDRH2, CDRH3, CDRL1, CDRL2 and CDRL3, or the VH, or the VL or the VII and VL region from RG-6058 (MTIG-7192A), or CASC-TIGIT, or COM-902, or OMP-313M32, or AB-154, or BMS-986207 (ONO-4686), or 313R12, or 313R19, or 313M32, or 741182 (MAB7898) (R & D Systems), or MBSA43 (Affymetrix eBioscience), or 1G9 ab136311 or ab107664 (Abcam), or from any one of the anti-TIGIT antibodies described in WO2017/053748 & US2017/0088613 (including 1A4, 1D3, 4A3, 10A7, 4.1D3.Q1E, 4.1D3, 1A5, h10A7.K4G3, 4.1D3 and the other antibodies described in Examples 1 and 2), WO2017/037707 (including VSIG9#1 and 258-csl #4), WO2017/030823 (including 14D7, 26610 and humanized versions in Example 3), WO2016/191643 & US2016/0376365 (including 313RM, 313Rb2, 313Rb1, 313M32, 313M26, 313M34, 313M33, 313R11, 313R12, 313R13, 313R14, 313R19, 313R20, ATCC PTA-122180 and ATCC PTA-122181), WO2016/106302 & US2016/176963 (including 14B2, 13E6, 6F9, 11G11, 10C9, 16F6, 11C9, 27A9, 10D7, 20G6, 24E8, 24G1, 27F1, 15A6, 4E4, 13D1, 9B11, 10B8, 22G2, 19H2, 8C8, 17G4, 25E7, 26D8 and 16A8), WO2016/028656 (including 14A6, 28H5 or 31C06 and humanized versions from Example 6), WO2006/124667 & US2007/054360 & US2009/156495 & US2010/316646 & US2012/219540 & US2015/0152160 & US2016/185863 (including 318.4.1.1, 318.28.2.1, 318.39.1.1, 318.59.3.1, 318.77.1.10), WO2015/143343 & US2017/107300 (including 4D4), and WO2009/126688 & US2009/0258013 & US2013/0251720 (U.S. Pat. No. 9,499,596) & US2017/0145093 (including 10A7 and 1F4); the sequences and features of the anti-TIGIT antibodies are incorporated herein by reference. In an example, the kit comprises an anti-TIGIT antibody disclosed in the immediately preceding sentence and an anti-PD-L1 antibody disclosed in the immediately preceding paragraph).

[1684] In an example, the antibody, fragment, ICK or fusion protein comprises an anti-TIGIT binding site comprising VH and VL domains of KY01, KY02, KY03 or KY04; and an anti-ICIOS binding site comprising VH and VL domains selected from STIM0003, STIM0001, those described in arrangement 5 and arrangement 5a hereinbelow, and any of the anti-ICOS antibodies described in sentences 1 to 102 and sentences 1a to 21a. In an example, the antibody, fragment, ICK or fusion protein comprises an anti-TIGIT binding site comprising VH and VL domains of KY01, KY02, KY03 or KY04; and an anti-ICOS binding site comprising VH and VL domains of STIM0003 or STIM0001. For example, the antibody, fragment, ICK or fusion protein comprises an anti-TIGIT binding site comprising VH and VL domains of KY01; and an anti-ICOS binding site comprising VH and VL domains of STIM0003. For example, the antibody, fragment, ICK or fusion protein comprises an anti-TIGIT binding site comprising VH and VL domains of KY02; and an anti-ICOS binding site comprising VH and VL domains of STIM0003. For example, the antibody, fragment, ICK or fusion protein comprises an anti-TIGIT binding site comprising VH and VL domains of KY03; and an anti-ICOS binding site comprising VH and VL domains of STIM0003. For example, the antibody, fragment, ICK or fusion protein comprises an anti-TIGIT binding site comprising VH and VL domains of KY04; and an anti-ICOS binding site comprising VH and VL domains of STIM0003.

[1685] In an example, the another antigen is a human immune checkpoint inhibitor, eg, human PD-L1 or human ICOS; or an immune modulator or activator, such as disclosed herein.

[1686] In an example, the further binding site is an agonist binding site for said another antigen. In an example, the further binding site is an antagonist binding site for said another antigen.

[1687] In an example, the further binding site is an antibody binding site comprising a VH and a VL; a binding site comprised by a constant domain of the antibody (eg, an Fcab binding site) or a non-immunoglobulin binding site (eg, an fibronectin domain). Optionally, the antigen-binding site is any antigen-binding site disclosed herein.

[1688] In an aspect, the invention provides any immunocytokine (ICK) disclosed herein, wherein the ICK comprises an anti-TIGIT binding site, wherein the immunocytokine comprises an antibody binding site that specifically binds TIGIT and optionally comprises a VH domain of the heavy chain, the VH domain being an anti-TIGIT VH as defined herein. In an example the binding site comprise an anti-TIGIT VL as described herein.

[1689] In an example, the anti-TIGIT ICK or bispecific antibody is for use in a method of treating or preventing a hTIGIT-mediated disease or condition (eg, any disease or condition disclosed herein) in a human or animal subject. Optionally, the method comprises antagonising hPD-L1 and/or hICOS. Optionally, the method comprises antagonising or agonising hICOS.

[1690] Optionally, an anti-TIGIT antibody, fragment or ICK of the invention further comprises an anti-ICOS binding site or is in combination with an anti-ICOS antibody, the binding site may be a binding site of any anti-ICOS antibody described in GB patent application 1620414.1 (filed 1 Dec. 2016), or the antibody in the combinationmay be such an antibody, the sequences of the anti-ICOS antibodies disclosed therein are incorporated herein by reference. For example, the anti-ICOS antibody is selected from STIM001, STIM002, STIM002-B, STIM003, STIM004, STIM005, STIM006, STIM007, STIM008 or STIM009 or comprise the STIM001, STIM002, STIM002-B, STIM003, STIM004, STIM005, STIM006, STIM007, STIM008 and STIM009.

[1691] The invention also provides:—

[1692] An anti-TIGIT antibody or fragment of the invention comprising an anti-PD-L1 binding site (or in combination with an anti-PD-L1 antibody or binding site) which specifically binds to a PD-L1 epitope to which an anti-PD-L1 antibody disclosed or incorporated by reference herein specifically binds.

[1693] An anti-TIGIT antibody or fragment of the invention comprising an anti-PD-L1 binding site (or in combination with an anti-PD-L1 antibody or binding site) which specifically binds to a PD-L1 epitope to which the antibody 84G09 specifically binds.

[1694] An anti-TIGIT antibody or fragment of the invention comprising an anti-PD-L1 binding site (or in combination with an anti-PD-L1 antibody or binding site) which specifically binds to a PD-L1 epitope to which the antibody 411B08 specifically binds.

[1695] An anti-TIGIT antibody or fragment of the invention comprising an anti-PD-L1 binding site (or in combination with an anti-PD-L1 antibody or binding site) which specifically binds to a PD-L1 epitope to which the antibody 411C04 specifically binds.

[1696] An anti-TIGIT antibody or fragment of the invention comprising an anti-PD-L1 binding site (or in combination with an anti-PD-L1 antibody or binding site) which specifically binds to a PD-L1 epitope to which the antibody 411D07 specifically binds.

[1697] An anti-TIGIT antibody or fragment of the invention comprising an anti-PD-L1 binding site (or in combination with an anti-PD-L1 antibody or binding site) which specifically binds to a PD-L1 epitope to which the antibody 385F01 specifically binds.

[1698] An anti-TIGIT antibody or fragment of the invention comprising an anti-PD-L1 binding site (or in combination with an anti-PD-L1 antibody or binding site) which specifically binds to a PD-L1 epitope to which the antibody 386H03 specifically binds.

[1699] An anti-TIGIT antibody or fragment of the invention comprising an anti-PD-L1 binding site (or in combination with an anti-PD-L1 antibody or binding site) which specifically binds to a PD-L1 epitope to which the antibody 389A03 specifically binds.

[1700] An anti-TIGIT antibody or fragment of the invention comprising an anti-PD-L1 binding site (or in combination with an anti-PD-L1 antibody or binding site) which specifically binds to a PD-L1 epitope to which the antibody 413D08 specifically binds.

[1701] An anti-TIGIT antibody or fragment of the invention comprising an anti-PD-L1 binding site (or in combination with an anti-PD-L1 antibody or binding site) which specifically binds to a PD-L1 epitope to which the antibody 413G05 specifically binds.

[1702] An anti-TIGIT antibody or fragment of the invention comprising an anti-PD-L1 binding site (or in combination with an anti-PD-L1 antibody or binding site) which specifically binds to a PD-L1 epitope to which the antibody 413F09 specifically binds.

[1703] An anti-TIGIT antibody or fragment of the invention comprising an anti-PD-L1 binding site (or in combination with an anti-PD-L1 antibody or binding site) which specifically binds to a PD-L1 epitope to which the antibody 414B06 specifically binds.

[1704] An anti-TIGIT antibody or fragment of the invention comprising an anti-PD-L1 binding site (or in combination with an anti-PD-L1 antibody or binding site) which specifically binds to a PD-L1 epitope to which the antibody 416E01 specifically binds.

[1705] 24a. For example, the antibody or fragment is a bispecific antibody or fragment. For example, the antibody or fragment is a dual binding antibody or fragment, or a fusion protein comprising an antibody or fragment thereof as defined in any preceding Statement. A dual binding antibody has the meaning as set out above.

[1706] In an example, the antibody, fragment or fusion protein of Statement 24 or 24a comprises a bispecific format selected from DVD-Ig, mAb², FIT-Ig, mAb-dAb, dock and lock, SEEDbody, scDiabody-Fc, diabody-Fc, tandem scFv-Fc, Fab-scFv-Fc, Fab-scFv, intrabody, BiTE, diabody, DART, TandAb, scDiabody, scDiabody-CH₃, Diabody-CH₃, minibody, knobs-in-holes, knobs-in-holes with common light chain, knobs-in-holes with common light chain and charge pairs, charge pairs, charge pairs with common light chain, in particular mAb², knob-in-holes, knob-in-holes with common light chain, knobs-in-holes with common light chain and charge pairs and FIT-Ig, e.g. mAb² and FIT-Ig.

[1707] In one embodiment, the bispecific format is selected from DVD-Ig, mAb², FIT-Ig, mAb-dAb, dock and lock, Fab-arm exchange, SEEDbody, Triomab, LUZ-Y, Fcab, KA-body, orthogonal Fab, scDiabody-Fc, diabody-Fc, tandem scFv-Fc, Fab-scFv-Fc, Fab-scFv, intrabody, BiTE, diabody, DART, TandAb, scDiabody, scDiabody-CH₃, Diabody-CH₃, Triple body, Miniantibody, minibody, TriBi minibody, scFv-CH₃ KIH, scFv-CH-CL-scFv, F(ab′)₂-scFv, scFv-KIH, Fab-scFv-Fc, tetravalent HCab, ImmTAC, knobs-in-holes, knobs-in-holes with common light chain, knobs-in-holes with common light chain and charge pairs, charge pairs, charge pairs with common light chain, DT-IgG, DutaMab, IgG(H)-scFv, scFv-(H)IgG, IgG(L)-scFv, scFv-(L)IgG, IgG(L,H)-Fv, IgG(H)-V, V(H)-IgG, IgG(L)-V, V(L)-IgG, KIH IgG-scFab, 2scFv-IgG, IgG-2scFv, scFv4-Ig and zybody.

[1708] In one embodiment, the bispecific format is selected from DVD-Ig, FIT-Ig, mAb-dAb, dock and lock, Fab-arm exchange, SEEDbody, Triomab, LUZ-Y, Fcab, KA-body, orthogonal Fab, scDiabody-Fc, diabody-Fc, tandem scFv-Fc, Fab-scFv-Fc, Fab-scFv, intrabody, BiTE, diabody, DART, TandAb, scDiabody, scDiabody-CH₃, Diabody-CH₃, Triple body, Miniantibody, minibody, TriBi minibody, scFv-CH₃ KIH, scFv-CH-CL-scFv, F(ab′)₂-scFv, scFv-KIH, Fab-scFv-Fc, tetravalent HCab, ImmTAC, knobs-in-holes, knobs-in-holes with common light chain, knobs-in-holes with common light chain and charge pairs, charge pairs, charge pairs with common light chain, DT-IgG, DutaMab, IgG(H)-scFv, scFv-(H)IgG, IgG(L)-scFv, scFv-(L)IgG, IgG(L,H)-Fv, IgG(H)-V, V(H)-IgG, IgG(L)-V, V(L)-IgG, KIH IgG-scFab, 2scFv-IgG, IgG-2scFv, scFv4-Ig and zybody, for example DVD-Ig, FIT-Ig, mAb-dAb, dock and lock, SEEDbody, scDiabody-Fc, diabody-Fc, tandem scFv-Fc, Fab-scFv-Fc, Fab-scFv, intrabody, BiTE, diabody, DART, TandAb, scDiabody, scDiabody-CH₃, Diabody-CH₃, minibody, knobs-in-holes, knobs-in-holes with common light chain, knobs-in-holes with common light chain and charge pairs, charge pairs, charge pairs with common light chain, in particular knob-in-holes, knob-in-holes with common light chain, knobs-in-holes with common light chain and charge pairs and FIT-Ig, e.g. FIT-Ig.

[1709] In one embodiment, the bispecific format is selected from DVD-Ig, mAb², mAb-dAb, dock and lock, Fab-arm exchange, SEEDbody, Triomab, LUZ-Y, Fcab, KA-body, orthogonal Fab, scDiabody-Fc, diabody-Fc, tandem scFv-Fc, Fab-scFv-Fc, Fab-scFv, intrabody, BITE, diabody, DART, TandAb, scDiabody, scDiabody-CH₃, Diabody-CH₃, Triple body, Miniantibody, minibody, TriBi minibody, scFv-CH₃ KIH, scFv-CH-CL-scFv, F(ab′)₂-scFv, scFv-KIH, Fab-scFv-Fc, tetravalent HCab, ImmTAC, knobs-in-holes, knobs-in-holes with common light chain, knobs-in-holes with common light chain and charge pairs, charge pairs, charge pairs with common light chain, DT-IgG, DutaMab, IgG(H)-scFv, scFv-(H)IgG, IgG(L)-scFv, scFv-(L)IgG, IgG(L,H)-Fv, IgG(H)-V, V(H)-IgG, IgG(L)-V, V(L)-IgG, KIN IgG-scFab, 2scFv-IgG, IgG-2scFv, scFv4-Ig and zybody, for example DVD-Ig, mAb², mAb-dAb, dock and lock, SEEDbody, scDiabody-Fc, diabody-Fc, tandem scFv-Fc, Fab-scFv-Fc, Fab-scFv, intrabody, BiTE, diabody, DART, TandAb, scDiabody, scDiabody-CH₃, Diabody-CH₃, minibody, knobs-in-holes, knobs-in-holes with common light chain, knobs-in-holes with common light chain and charge pairs, charge pairs, charge pairs with common light chain, in particular mAb², knob-in-holes, knobs-in-holes with common light chain and charge pairs, and knob-in-holes with common light chain, e.g. mAb².

[1710] In one embodiment, the bispecific format is selected from DVD-Ig, mAb-dAb, dock and lock, Fab-arm exchange, SEEDbody, Triomab, LUZ-Y, Fcab, KA-body, orthogonal Fab, scDiabody-Fc, diabody-Fc, tandem scFv-Fc, Fab-scFv-Fc, Fab-scFv, intrabody, BITE, diabody, DART, TandAb, scDiabody, scDiabody-CH₃, Diabody-CH₃, Triple body, Miniantibody, minibody, TriBi minibody, scFv-CH₃ KIH, scFv-CH-CL-scFv, F(ab′)₂-scFv, scFv-KIH, Fab-scFv-Fc, tetravalent HCab, ImmTAC, knobs-in-holes, knobs-in-holes with common light chain, knobs-in-holes with common light chain and charge pairs, charge pairs, charge pairs with common light chain, DT-IgG, DutaMab, IgG(H)-scFv, scFv-(H)IgG, IgG(L)-scFv, scFv-(L)IgG, IgG(L,H)-Fv, IgG(H)-V, V(H)-IgG, IgG(L)-V, V(L)-IgG, KIH IgG-scFab, 2scFv-IgG, IgG-2scFv, scFv4-Ig and zybody, for example DVD-Ig, mAb-dAb, dock and lock, SEEDbody, scDiabody-Fc, diabody-Fc, tandem scFv-Fc, Fab-scFv-Fc, Fab-scFv, intrabody, BITE, diabody, DART, TandAb, scDiabody, scDiabody-CH₃, Diabody-CH₃, minibody, knobs-in-holes, knobs-in-holes with common light chain, knobs-in-holes with common light chain and charge pairs, charge pairs, charge pairs with common light chain, in particular knob-in-holes, knobs-in-holes with common light chain and charge pairs, and knob-in-holes with common light chain.
[1711] 25. An anti-TIGIT immunocytokine comprising an immunoglobulin heavy and an optional light chain, wherein immunocytokine comprises an antibody binding site that specifically binds TIGIT and optionally comprises a VH domain of the heavy chain, the VH domain being as defined in any preceding Statement.

[1712] In an example, the immunocytokine comprises a H2 antibody (ie, an antibody comprising first and second heavy chains and being devoid of a light chain).
[1713] 26. The immunocytokine of Statement 25, comprising a cytokine (eg, IL-2, eg, human IL-2 or a functional cytokine fragment thereof) fused to the heavy or light chain.
[1714] 27. The immunocytokine of Statement 25 or 26, wherein
   [1715] (i) The heavy chain comprises in N- to C-terminal direction:
   [1716] (i) Said VH domain;
   [1717] (ii) A heavy chain constant region;
   [1718] (iii) Optionally, a linker, (L); and
   [1719] (iv) And said cytokine; or
   [1720] (ii) The light chain comprises in N- to C-terminal direction:
   [1721] (v) A VL domain of said binding site (eg, a VL as defined in any one of Statements 6 to 9);
   [1722] (vi) A light chain constant region;
   [1723] (vii) Optionally, a linker, (L); and
   [1724] (viii) And said cytokine.

[1725] In one embodiment, the antigen binding site binds TIGIT simultaneously to the IL-2 cytokine binding the αβγ IL-2R. In one embodiment, the antigen binding site binds TIGIT sequentially to the IL-2 cytokine binding the αβγ IL-2R. In one embodiment, the IL-2 cytokine additionally binds the intermediate (βγ) IL-2R.

[1726] In one embodiment, the immunocytokine inhibits TIGIT-mediated suppression of NK and/or T-cells. In one embodiment, the immunocytokine inhibits TIGIT-mediated suppression of NK and/or T-cells in an in vitro assay.
[1727] 28. The immunocytokine of Statement 25, 26 or 27, further comprising an antigen-binding site that specifically binds another antigen (eg, human PD-L1) or TIGIT; optionally wherein the further binding site is a binding site of an antibody selected from 1D05, 84G09, 413G05, 416E01, STIM003 and STIM001.

[1728] In an example, the another antigen-binding site is a binding site of 1D05.

[1729] In an example, the another antigen-binding site is a binding site of 84G09.

[1730] In an example, the another antigen-binding site is a binding site of STIM003.

[1731] The examples of another antigen and other features of Statements 24 and 24a apply mutatis mutandis to Statement 28. Any of the disclosure herein relating to an anti-immune checkpoint inhibitor ICK (eg, an anti-PD-L1 ICK or anti-ICOS ICK) applies mutatis mutandis to anti-TIGIT ICKs herein (eg, ICKs of Statements 25 onwards), except where the ICK specificity is for TIGIT instead of the immune checkpoint inhibitor or in addition to the immune checkpoint inhibitor. Any of the embodiments of aspect 1 herein relating to anti-PD-L1 ICKs apply mutatis mutandis to anti-TIGIT ICKs herein (eg, ICKs of Statements 25 onwards), except where the ICK specificity is for TIGIT instead of PD-L1 or in addition to PD-L1. Any of the features or embodiments of anti-PD-L1 ICK aspects 2 to 54 apply mutatis mutandis anti-TIGIT ICKs herein (eg, ICKs of Statements 25 onwards), except where the ICK specificity is for TIGIT instead of PD-L1 or in addition to PD-L1. Any of the features of the antibodies or other embodiments or features of concepts 1 to 70 apply mutatis mutandis to anti-TIGIT ICKs herein (eg, ICKs of Statements 25 onwards), except where the ICK specificity is for TIGIT instead of PD-L1 or in addition to PD-L1.
[1732] 29. The antibody, fragment or immunocytokine according to any preceding Statement wherein the antibody or fragment is capable of inhibiting TIGIT-mediated suppression of T-cells and/or NK cells that express TIGIT, for example by increasing activation as measured by an increase in one or more of IFNγ, IL-2, CD25 or proliferation of T-cells and/or NK cells in an assay that provides co-stimulation by direct CD3/CD28 stimulation or provides co-stimulation by co-incubation with cells capable of inducing a T-cell and/or NK cell response.

[1733] In an example, the antibody, fragment or immunocytokine is capable of inhibiting TIGIT-mediated suppression of T-cells and/or NK cells that express TIGIT, for decreasing release of of IL-10 and increasing release of IL-12 by dentritic cells expressing one or more TIGIT binding parterns, eg, CD155, CD112 and/or CD113.

[1734] The measurements may be carried out with any suitable technique. For example, the measurements may be taken with ELISA, DELFIA® Time-resolved fluorescence, HTRF, BRDU incorporation (proliferation), electrochemiluminescence (ECL) or flow cytometry (e.g. FACS). These techniques are well-known to those skilled in the art and are described elsewhere herein. In one embodiment, the assay is DELFIA® Time-resolved fluorescence. In one embodiment, the assay is flow cytometry. In one embodiment, the assay is ELISA. In one embodiment, the assay is HTRF.

[1735] In one embodiment, inhibiting of said TIGIT-meditated immune suppression of T cells is measured by an increase in IFNγ. In one embodiment, inhibiting of said TIGIT-meditated immune suppression of T cells is measured by an increase in IL-2. In one embodiment, inhibiting of said TIGIT-meditated immune suppression of T cells is measured by an increase in CD25. In one embodiment, inhibiting of said TIGIT-meditated immune suppression of T cells is measured by an increase in IFNγ and IL-2. In one embodiment, inhibiting of said TIGIT-meditated immune suppression of T cells is measured by an increase in IFNγ and CD25. In one embodiment, inhibiting of said TIGIT-meditated immune suppression of T cells is measured by an increase in CD25 and IL-2. In one embodiment, inhibiting of said TIGIT-meditated immune suppression of T cells is measured by an increase in IFNγ, IL-2 and CD25.

[1736] In one embodiment, the inhibiting of said TIGIT-meditated immune suppression of T cells is measured by an decrease in IL-10 produced by dentric cells. In one embodiment, the inhibiting of said TIGIT-meditated immune suppression of T cells is measured by a increase in IL-12 produced by dentric cells. In one embodiment, inhibiting of said TIGIT-meditated immune suppression of T cells is measured by an decrease of IL-10 and an increase in IL-12 produced by dentric cells.

[1737] In one embodiment, the co-stimulation is provided by direct CD3/CD28 stimulation.

[1738] In one embodiment, the co-stimulation is provided by a superantigen, such as staphylococcal enterotoxin B (SEB).

[1739] In one embodiment, the assay provides co-stimulation by co-incubation with cells capable of inducing a T-cell response. Such cells may be antigen-presenting cells (APCs), for example monocytes, B-cells or dendritic cells. In one embodiment, the assay provides co-stimulation by co-incubation with APCs. In one embodiment, the assay provides co-stimulation by co-incubation with monocytes. In one embodiment, the assay provides co-stimulation by co-incubation with B-cells. In one embodiment, the assay provides co-stimulation by co-incubation with dendritic cells.

[1740] The antibody, fragment or immunocytokine according to any preceding Statement wherein the antibody or fragment is capable of inhibiting TIGIT-mediated suppression of NK cells that express TIGIT, for example by increasing activation as measured by an increase of IFNγ and/or increasing NK-mediated cytotoxicity.

[1741] In one embodiment, inhibiting of said TIGIT-meditated immune suppression of NK cells is measured by an increase in IFNγ. In one embodiment, inhibiting of said TIGIT-meditated immune suppression of NK cells is measured by an increase in killing of target cells (eg. tumour cells expressing CD155 and/or CD112). In one embodiment, inhibiting of said TIGIT-meditated immune suppression of NK cells is measured by an increase in IFNγ and an increase in killing of target cells (eg. tumour cells expressing CD155 and/or CD112).

[1742] In one embodiment, inhibiting of said TIGIT-meditated immune suppression of NK cells is measured by an increase in killing of target cells (eg. tumour cells expressing CD155 and/or CD112) in vitro. In one embodiment, inhibiting of said TIGIT-meditated immune suppression of NK cells is measured by an increase in killing of target cells (eg. tumour cells expressing CD155 and/or CD112) in vivo. In one embodiment, inhibiting of said TIGIT-meditated immune suppression of NK cells is measured by an increase in IFNγ and an increase in killing of target cells (eg. tumour cells expressing CD155 and/or CD112) in vitro. In one embodiment, inhibiting of said TIGIT-meditated immune suppression of NK cells is measured by an increase in IFNγ and an increase in killing of target cells (eg. tumour cells expressing CD155 and/or CD112) in vivo.

[1743] In one embodiment, inhibiting of said TIGIT-meditated immune suppression of NK cells is measured by an increase in DNAM-1-mediated activation. In one embodiment, inhibiting of said TIGIT-meditated immune suppression of NK cells is measured by an increase in DNAM-1-mediated activation and an increase in killing of target cells (eg. tumour cells expressing CD155 and/or CD112) in vitro or in vivo.

[1744] In an example, the T-cells comprise memory T-cells (eg, memory CD45RO⁺ cells) and/or CD4⁺CD25^{hi} Tregs cells, eg, which T-cells express Foxp3 and/or GITR. In an embodiment, the cells express PD-1, eg, comprise CD8⁺, PD-1⁺ T-cells and/or CD4⁺, PD-1⁺ T-cells. In an example, the T-cells comprise lung, colon, breast, uterine or renal cancer patient CD8⁺ TILS or T-cells, eg, Lung, colon, uterine, breast or kidney cancer, eg, lung (LUSC), non-small-cell carcinomas (NSCLC), colon adenocarcinoma (COAD), uterine corpus endometroid carcicoma (UCEC), breast (BRCA) or kidney renal cell carcinoma (KIRC) cancer patient CD8⁺ TILS or T-cells, eg, wherein the cancer is a PD-L1 positive cancer.
[1745] 30. The antibody, fragment or immunocytokine according to any preceding Statement wherein the antibody, fragment or immunocytokine is capable of inhibiting TIGIT-meditated immune suppression of T-cells and/or NK cells that express TIGIT, wherein the antibody, fragment or immunocytokine is for administration to a subject for increasing T- and/or NK cell proliferation, cytokine production by T- and/or NK cells, or degranulation of tumour antigen-specific CD8+ T cells and/or TIL CD8+ T cells in the subject for treating cancer or viral infection in the subject.

[1746] Optionally, the antibody, fragment or immunocytokine is capable of inhibiting TIGIT-meditated immune suppression of T-cells and/or NK cells that express TIGIT in vitro. Optionally, the antibody, fragment or immunocytokine is capable of (or for) of inhibiting TIGIT-meditated immune suppression of T-cells and/or NK cells that express TIGIT in vivo. Optionally, the antibody, fragment or immunocytokine is capable of inhibiting hTIGIT-meditated immune suppression of human T-cells and/or human NK cells that express hTIGIT.

[1747] Optionally, the subject is a human or animal subject, eg, wherein the subject is refractory to another cancer therapy.
[1748] 31. The antibody, fragment or immunocytokine according to any preceding Statement wherein the antibody, fragment or immunocytokine is capable of inhibiting TIGIT-meditated immune suppression of human T-cells and/or human NK cells that express TIGIT, wherein the antibody, fragment or immunocytokine is for administration to a human subject for treating a cancer in the subject by enhancing T- and/or NK cell-mediated anti-cancer immune activity in the subject.

[1749] Optionally, the antibody, fragment or immunocytokine is capable of (or for) enhancing anti-cancer immune activity of exhausted CD8⁺ T cells in a subject, eg, for treating or preventing a disease or condition such as cancer or an autoimmune condition disclosed herein. Optionally, the subject is a human or animal subject, eg, wherein the subject is refractory to another cancer therapy.
[1750] 32. The antibody, fragment or immunocytokine according to any preceding Statement wherein the antibody, fragment or immunocytokine is capable of inhibiting TIGIT-meditated immune suppression of human T_{reg} cells that express TIGIT, wherein the antibody or fragment is for administration to a human subject for treating a cancer in the subject by reducing Treg-mediated suppression of anti-cancer immune activity in the subject.

[1751] In an example, the antibody, fragment or immunocytokine is capable of inhibiting TIGIT-meditated immune suppression of human T_{reg} cells that express TIGIT, wherein the antibody or fragment is for administration to a human subject for treating a cancer in the subject by depleting T_{reg} cells in the subject.

[1752] Optionally, the antibody or fragment comprises an IgG1 constant region having ADCC and/or CDC activity, wherein the antibody or fragment is capable of inhibiting TIGIT expressed by human Treg cells, wherein the antibody or fragment is for administration to a human subject for treating a cancer (or other disease or condition mentioned herein) in the subject by ADCC and/or CDC-mediated depletion of Treg cells in the subject.
[1753] 33. The antibody, fragment or immunocytokine according to any one of Statements 30 to 32 wherein the antibody or fragment is capable of inhibiting binding of TIGIT with one or more of CD155, CD112 and CD113 (eg, CD155) for carrying out said increasing of Statement 30, enhancing of Statement 31, or reducing of Statement 32.

[1754] In an embodiment, the CD155 disclosed herein is CD155 (sCD155) that lacks a transmembrane region. sCD155 levels have been found to be significantly higher in the sera of patients with lung, gastrointestinal, breast, and gynecologic cancers. sCD155 levels have been seen to be significantly higher in patients with early stage (stages 1 and 2) gastric cancer than in healthy donors, and were significantly higher in patients with advanced stage (stages 3 and 4) disease than in patients in those with early stage disease and healthy donors. Optionally, therefore, the CD155 is sCD155 and the subject (eg, human) is a lung, gastrointestinal, breast, or gynecologic cancer patient or the cancer treated or prevented by the antibody, fragment or immunocytokine is such a cancer. Additionally or alternatively, the antibody, fragment or ICK of the invention is capable of binding (or binds) cell-surface TIGIT for treating or preventing said disease or condition in a subject comprising serum sCD155. In an embodiment, the subject is suffering from, or the cancer is, a stage 1 or 2 gastric cancer.

[1755] In an embodiment, the antibody or fragment or ICK is capable of binding TIGIT in a binding assay selected from
[1756] (a) A ELISA or HTRF assay used to detect binding of human TIGIT by the antibody or fragment or ICK compared a first control anti-TIGIT antibody (deemed to be 100% binding of human TIGIT), [eg, wherein the control antibody is MAB7898 (R&D Systems)] and wherein a second control antibody is deemed to have 0% binding of human TIGIT (eg, wherein the second control antibody is M5534, Sigma Aldrich);
[1757] (b) A ELISA or HTRF assay used to detect binding of cynomolgus monkey TIGIT by the antibody or fragment or ICK compared a third control anti-TIGIT antibody (deemed to be 100% binding of cyno TIGIT), [eg, wherein the control antibody MBSA43 (eBiosciences)] and wherein a fourth control antibody is deemed to have 0% binding of cyno TIGIT (eg, wherein the fourth control antibody is M5284, Sigma Aldrich); and
[1758] (c) An ELISA or HTRF assay to detect binding of the antibody, fragment or ICK to mouse TIGIT by the antibody or fragment or ICK compared a fifth control anti-TIGIT antibody (deemed to be 100% binding of mouse TIGIT), [eg, wherein the control antibody is 142102 (Biolegend)] and wherein a sixth control antibody is deemed to have 0% binding of mouse TIGIT (eg, wherein the sixth control antibody is M5284, Sigma Aldrich).

[1759] For example, wherein
[1760] (i) The TIGIT is human TIGIT, the binding of the antibody or fragment or ICK is >5% versus the first control, eg, >10, 20, 30, 40, 50, 60, 70, 80, 90 or 95%;
[1761] (ii) The TIGIT is mouse TIGIT, the binding of the antibody or fragment or ICK is >5% versus the fifth control, eg, >10, 20, 30, 40, 50, 60, 70, 80, 90 or 95%; or
[1762] (iii) The TIGIT is cyno TIGIT, the binding of the antibody or fragment or ICK is >5% versus the third control, eg, >10, 20, 30, 40, 50, 60, 70, 80, 90 or 95%.

[1763] In an embodiment, the antibody or fragment or ICK is capable of inhibiting binding of CD155 to TIGIT in an assay selected from a
[1764] (a) HTRF or flow cytometry assay used to detect inhibiting binding of hCD155 to hTIGIT by the antibody or fragment or ICK determined by comparing the HTRF or flow cytometry assay signal thereof to the HTRF signal of binding of CD155 to TIGIT in the absence of the antibody or fragment or ICK (the latter deemed to be 100% binding); and wherein the HTRF or flow cytometry assay signal in the presence of CD155 (but in the absence of TIGIT) or vice versa is deemed to have 0% binding;
[1765] (b) HTRF or flow cytometry assay used to detect inhibiting binding of cyno CD155 to cyno TIGIT by the antibody or fragment or ICK determined by comparing the HTRF or flow cytometry assay signal thereof to the HTRF signal of binding of CD155 to TIGIT in the absence of the antibody or fragment or ICK (the latter deemed to be 100% binding); and wherein the HTRF or flow cytometry assay signal in the presence of CD155 (but in the absence of TIGIT) or vice versa is deemed to have 0% binding; and
[1766] (c) HTRF or flow cytometry assay used to detect inhibiting binding of mouse CD155 to mouse TIGIT by the antibody or fragment or ICK determined by comparing the HTRF or flow cytometry assay signal thereof to the HTRF signal of binding of CD155 to TIGIT in the absence of the antibody or fragment or ICK (the latter deemed to be 100% binding); and wherein the HTRF or flow cytometry assay signal in the presence of CD155 (but in the absence of TIGIT) or vice versa is deemed to have 0% binding.

[1767] For example, in the HTRF or flow cytometry assay signal of binding of said CD155 to TIGIT in the presence of the antibody or fragment or ICK is <70%, eg <60, 50, 40, 30, 20, 10, 5, 4, 3, 2 or 1%.

[1768] In one embodiment, the concentration of test antagonist (e.g. antibody or fragment or ICK) is titrated to provide a curve of % specific binding. In an example, the % specific binding of the test antagonist is determined, for example using Equation 18 below; and/or the IC50 of the antagonist is determined, for example using Equation 20 below.

[1769] In an example, the % specific binding of the antagonist is determined using HTRF by:
[1770] 1. Combining recombinant hCD155 with recombinant hTIGIT in a plate;
[1771] 2. Allowing a sufficient period of time to reach binding equilibrium (e.g. 30 min);
[1772] 3. Adding test antagonist and leaving for a sufficient period of time to equilibrate (e.g. approximately 1 hour);
[1773] 4. Reading the plate using a reader capable of exciting the donor molecule and capable of measuring the wavelength of emission of both the donor and accepter fluorescent molecules; and
[1774] 5. Determining the % specific binding of the test antagonist, for example using Equation 18; and/or
[1775] 6. Determining the IC50 of the antagonist (e.g. antibody or fragment thereof), for example using Equation 20.

[1776] Similarly, these steps can be carried out where the assay is a flow cytometry assay except in step 1 the TIGIT is cell-expressed.

[1777] Examples of plate readers include EnVision™ (Perkin Elmer), PHERAstar® FSX, CLARIOstar®, and FLUOstar®, and POLARstar® Omega. Suitable FACS apparatus for a flow cytometry assay is Cytoflex™.

[1778] In one embodiment, the HTRF assay is carried out in HTRF buffer (e.g. PBS (Sigma)+0.53 M KF (Sigma)+0.1% w/v BSA (Sigma)). In one embodiment, the FACS assay is carried out in FACS buffer (eg, PBS (Sigma)+1% w/v BSA+0.1% w/v sodium azide).

[1779] The data (e.g. % specific binding) can be fitted using standard analysis techniques, e.g., using GraphPad/PRISM analysis software.

[1780] In an embodiment, the antibody or fragment or ICK inhibits TIGIT binding to CD155 in a TIGIT/CD155 receptor-ligand neutralisation HTRF assay.

[1781] In an embodiment, the antibody or fragment or ICK is capable of specifically binding to cell surface TIGIT expressed by CHO cells, wherein the TIGIT is mouse or human TIGIT.

[1782] In an embodiment, the antibody or fragment or ICK specifically binds and/or neutralises human and/or mouse TIGIT in an assay, wherein the assay is selected from
[1783] (a) A HTRF assay;
[1784] (b) A FACS assay; or
[1785] (c) An SPR assay.

[1786] In an embodiment, the antibody or fragment or ICK
[1787] (a) binds to human TIGIT with a KD in the range from 0.1 to 5 nM as determined by SPR;
[1788] (b) binds to cynomolgus monkey TIGIT with a KD in the range from 0.1 to 50 nM as determined by SPR; and/or
[1789] (c) Neutralises the binding of TIGIT (eg, human TIGIT) to CD155 (eg, human CD155) with an IC50 in the range from 0.09 to 1, 2 or 3 nM as measured by flow cytometry or ligand-receptor HTRF® assay.

[1790] In an embodiment, the antibody or fragment or ICK inhibits TIGIT binding to CD155 in a TIGIT/CD155 receptor-ligand neutralisation HTRF assay.

[1791] In an embodiment, the antibody or fragment or ICK inhibits TIGIT binding to CD155 in a TIGIT/CD155 receptor-ligand neutralisation HTRF assay.

[1792] In an embodiment, the CD155 disclosed herein is expressed on dendritic cells or activated T-cells.
[1793] 34. The antibody, fragment or immunocytokine according to any preceding Statement wherein the antibody, fragment or immunocytokine is not capable of inhibiting binding of hCD96 and/or hDNAM-1 (CD226) with hCD155 and/or CD112; or wherein the antibody, fragment or immunocytokine inhibits the binding of CD155 and/or CD112 with TIGIT to a greater extent or a stronger affinity (eg, as determined by SPR) than with DNAM-1.
[1794] 35. The antibody, fragment or immunocytokine according to any preceding Statement wherein the antibody, fragment or immunocytokine is capable of inhibiting binding of hCD96 and/or hDNAM-1 with hCD155.

[1795] The invention also provides:—

[1796] The antibody or fragment or ICK according to any Statement wherein the antibody or fragment or ICK is capable of inhibiting TIGIT mediated inhibition of DNAM-1 homodimerization. Additionally or alternatively, the antibody or fragment or ICK according to any Statement wherein the antibody or fragment or ICK is capable of inhibiting binding of hCD96 with hCD155 more strongly than hDNAM-1 (CD226) with hCD155.

[1797] The antibody or fragment or ICK according to any Statement wherein the antibody or fragment or ICK is capable of inhibiting homodimerization of TIGIT. Additionally or alternatively, the antibody or fragment or ICK is capable of inhibiting homodimerization of CD155. Additionally or alternatively, the antibody or fragment or ICK is capable of inhibiting homodimerization of CD96. In an example, the antibody or fragment or ICK is capable of inhibiting homodimerization by no more than 50, 60, 70, 80, 90 or 95% versus homodimerization in the absence of the antibody or fragment or ICK.

[1798] Additionally or alternatively, the antibody or fragment or ICK is not capable of inhibiting homodimerization of CD226. In an alternative to being “not capable of inhibiting”, the antibody or fragment or ICK is capable of inhibiting homodimerization of CD226 by no more than 1, 2, 3, 4 5, 6, 7, 8, 9 or 10% versus homodimerization in the absence of the antibody or fragment or ICK.

[1799] Optionally, the antibody or fragment or ICK does not inhibit CD226 or CD226-mediated signalling in T and/or NK cells.

[1800] Optionally, the antibody or fragment or ICK is capable of inhibiting binding of TIGIT expressed by T-cells with hCD155 expressed by dendritic cells (DCs), eg, for reducing or suppressing IL-10 production in a subject for treating or preventing cancer or another disease or condition disclosed herein; and/or eg, for inhibiting reduction of IL-12 and IFN-γ secretion in a subject for treating or preventing cancer or another disease or condition disclosed herein.

[1801] Optionally, the antibody or fragment or ICK is capable of inhibiting binding of TIGIT expressed by NK cells with hCD155 expressed by dendritic cells (DCs), eg, for reducing or suppressing IL-10 production in a subject for treating or preventing cancer or another disease or condition disclosed herein; and/or eg, for inhibiting reduction of IL-12 and IFN-γ secretion in a subject for treating or preventing cancer or another disease or condition disclosed herein.

[1802] Optionally, the antibody or fragment or ICK is capable of inhibiting binding of TIGIT expressed by NK cells with hCD155 expressed by T-cells, eg, for reducing or suppressing IL-10 production in a subject for treating or preventing cancer or another disease or condition disclosed herein; and/or eg, for inhibiting reduction of IL-12 and IFN-γ secretion in a subject for treating or preventing cancer or another disease or condition disclosed herein. In an example, the T-cells are CD4+ T-cells. In an example, the T-cells are CD8+ T-cells.

[1803] Optionally, the the antibody or fragment or ICK is capable of inhibiting binding of TIGIT expressed by first T-cells with hCD155 expressed by second T-cells, eg, for reducing or suppressing IL-10 production in a subject for treating or preventing cancer or another disease or condition disclosed herein; and/or eg, for inhibiting reduction of IL-12 and IFN-γ secretion in a subject for treating or preventing cancer or another disease or condition disclosed herein. In an example, the first and/or second T-cells are CD4+ T-cells. In an example, the first and/or second T-cells are CD8+ T-cells.
[1804] 36. The antibody, fragment or immunocytokine according to any preceding Statement wherein the antibody or fragment is capable of inhibiting binding of TIGIT with hCD155; hCD112; hCD113; hCD155 and hCD112; hCD155 and hCD113; or hCD155, hCD112 and hCD113, optionally for administration to a human or animal subject for treating a cancer of viral infection in said subject.
[1805] 37. The antibody, fragment or immunocytokine according to any preceding Statement for treating a cancer in a human or animal subject by
   [1806] a. inhibiting the binding of TIGIT to CD155 in a tumour microenvironment;
   [1807] b. inhibiting P-Tyr and/or NFkβ signalling in TIGIT⁺ T- and/or NK cells;
   [1808] c. inhibiting tumour cell-mediated (eg, PD-L1-positive tumour cell-mediated) suppression of T- and/or NK cells in a tumour microenvironment of the cancer in a subject (eg, a human) suffering from the cancer; and/or
   [1809] d. reducing TIGIT-mediated inhibition of one or more T-cell factors in a tumour microenvironment of said cancer, wherein each factor is selected from T-bet, GATA3, IFN regulatory factor (IFR)4, RORc, IL-2 and IFN-γ.

[1810] An anti-TIGIT or fragment of the invention, for example, enhances T-cell and/or NK activity (eg, in vitro (such as for use as a diagonistic of a cancer or likelihood of treating a cancer using an antibody of the invention or another immune checkpoint inhibitor) or in a human or animal subject), but it can additionally or alternatively be used to target Tregs and reduce immune-suppressive signalling in the tumour microenvironment and/or to deplete Tregs.

[1811] In an example, the antibody or fragment specifically binds to TIGIT expressed by immune cells (eg, T and/or NK cells, eg, human cells, eg, cells comprised a human subject, eg, cells in vitro) and inhibits P-Tyr and/or NFkβ signalling in the cells. In an example the antibody or fragment specifically binds to TIGIT expressed by immune cells and reduce or inhibit IL-10 production (and optionally increases secretion of pro-inflammatory cytokines, eg, IL-12 and/or IFN-γ), such as in a tumour microenvironment (eg, any tumour in this paragraph). In an embodiment, the cells comprise memory and/or T_{reg} cells. For example, the memory cells are CD4+CD45RO⁺ memory cells. For example, the memory cells are CD4⁺CD25^{hi} T_{regs}. For example, the T_{reg} cells co-express Foxp3 and/or GITR in addition to TIGIT. For example, the T-cells comprise CD8⁺ T cells; CD4⁺ T cells; or CD4⁺ and CD8⁺ T cells, optionally wherein the cells are PD-1⁺ or PD-1^{high} For example, the T-cells comprise TILs (tumour infiltrating lymphocytes), eg, lung, colon, breast, uterine or renal tumour TILs in vitro or comprised by a patient (eg, a human) suffering from lung (eg, human non-small-cell carcinomas (NSCLC)), colon (eg, colon adenocarcinoma (COAD), breast, uterine (eg, uterine corpus endometroid carcicoma (UCEC)) or renal (eg, kidney renal cell carcinoma (KIRC)) cancer. For example, the TILS or T-cells are comprised by a patient suffering from a solid tumour. For example, a tumour herein is a PD-L1⁺ or PD-L1^{high} tumour. For example, the tumour is a TIGIT-negative (and optionally a PD-L1-positive) tumour. In an example, the antibody or fragment is for treating a cancer (such as a cancer mentioned herein or in this paragraph) by
[1812] (a) inhibiting the binding of TIGIT to CD155 in a tumour microenvironment, optionally wherein the TIGIT is expressed by immune cells as mentioned in this paragraph; and/or
[1813] (b) inhibiting P-Tyr and/or NFkβ signalling in TIGIT⁺ cells, wherein the cells comprise any immune cells mentioned in this paragraph; and/or
[1814] (c) reducing TIGIT-mediated inhibition of one or more T-cell factors in a tumour microenvironment, wherein each factor is selected from T-bet, GATA3, IFN regulatory factor (IFR)4, RORc, IL-2 and IFN-γ.

[1815] In an example, the CD155 is CD155 expressed on DCs (eg, DCs in a tumour microenvironment, eg wherein the tumour is a PD-L1-positive tumour). In an example, the CD155 is CD155 expressed on T-cells (eg, T-cells in a tumour microenvironment, eg wherein the tumour is a PD-L1-positive tumour) whose expression of one or more factors selected from T-bet, GATA3, IFN regulatory factor (IFR)4, RORc, IL-2 and IFN-γ is inhibited by TIGIT in the absence of inhibition of the binding of TIGIT to CD155 by the anti-TIGIT antibody or fragment of the invention. In an example, the antibody or fragment is for treating a cancer (such as a cancer mentioned herein or in this paragraph) by increasing production of IFN-γ mRNA by T-cells (eg, human CD4⁺ T cells, eg, in a tumour microenvironment, such as a microenvironment or in a cancer disclosed in this paragraph. In an example, the antibody or fragment is for treating a cancer (such as a cancer mentioned herein or in this paragraph) by decreasing production of IL-10 mRNA by T-cells (eg, human CD4⁺ T cells, eg, in a tumour microenvironment, such as a microenvironment or in a cancer disclosed in this paragraph. Any of the antibodies or fragments of the invention herein are for treating a cancer by inhibiting cancer cell-mediated (eg, PD-L1-positive cancer cell) suppression of the immune system of a patient (eg, a human) suffering from the cancer. In an embodiment, the suppression is suppression of T- and/or NK cells in a tumour microenvironment.

[1816] CD155 binds to TIGIT with a KD of 1-3 nM. In an example, advantageously the antibody or fragment of the invention binds TIGIT (eg, human TIGIT) with a KD of <1 nM, eg, <100, 90, 80, 70, 60, 50, 40, 30, 20, 10 or 1 μM. Optionally the KD is <1 nM, eg, <100, 90, 80, 70, 60, 50, 40, 30, 20, 10, wherein the KD is >1, 5 or 10 μM. In an embodiment, the K_{D} of the antibody or fragment is determined by SPR or any other affinity determining technique disclosed herein. This may be useful for favouring TIGIT interaction with the antibody or fragment over TIGIT interaction with CD155.

[1817] Optionally, the CD155 is expressed on dendritic cells (DCs), fibroblasts and/or endothelial cells, eg, the CD155 is expressed on DCs in vitro or comprised by a patient suffering from a cancer. Wherein the CD155 is expressed on tumour cells, optionally colorectal carcinomas, gastric cancer and neuroblastoma cells.

[1818] In an example the antibody, fragment or immunocytokine of the invention is for treating cancer in a refractory patients, such as a patient that is non-responsive or poorly responsive to a different cancer therapy, such as chemotherapy or a different immune checkpoint inhibitor (eg, ipilimumab (Yervoy®), pembrolizumab (Keytruda®/MK-3475), nivolumab (Opdivo®/BMS-936558/MDX-1106), MEDI-0680/AMP514, PDR001 or Lambrolizumab).

[1819] In an example, the cancer is a solid or haematological tumour, eg, a solid tumour with immune-responsiveness e.g. melanoma, NSCLC.
[1820] 38. An antibody, fragment or immunocytokine as defined in any preceding Statement for use in treating or preventing a TIGIT-mediated disease or condition, e.g. selected from neoplastic or non-neoplastic disease, chronic viral infections, and malignant tumours, such as melanoma, Merkel cell carcinoma, non-small cell lung cancer (squamous and non-squamous), renal cell cancer, bladder cancer, head and neck squamous cell carcinoma, mesothelioma, virally induced cancers (such as cervical cancer and nasopharyngeal cancer), soft tissue sarcomas, haematological malignancies such as Hodgkin's and non-Hodgkin's disease and diffuse large B-cell lymphoma (for example melanoma, Merkel cell carcinoma, non-small cell lung cancer (squamous and non-squamous), renal cell cancer, bladder cancer, head and neck squamous cell carcinoma and mesothelioma or for example virally induced cancers (such as cervical cancer and nasopharyngeal cancer) and soft tissue sarcomas).

[1821] In an example, the disease or condition is in a human. In an example, the disease or condition is in an animal.

[1822] In an example, the cancer is a lung, colon, uterine, breast or kidney cancer, eg, lung (LUSC), non-small-cell carcinomas (NSCLC), colon adenocarcinoma (COAD), uterine corpus endometroid carcicoma (UCEC), breast (BRCA) or kidney renal cell carcinoma (KIRC).
[1823] 39. Use of an antibody, fragment or immunocytokine as defined in any one of Statements 1 to 37 in the manufacture of a medicament for administration to a human for treating or preventing a TIGIT mediated disease or condition in the human, e.g. selected from neoplastic or non-neoplastic disease, chronic viral infections, and malignant tumours, such as melanoma, Merkel cell carcinoma, non-small cell lung cancer (squamous and non-squamous), renal cell cancer, bladder cancer, head and neck squamous cell carcinoma, mesothelioma, virally induced cancers (such as cervical cancer and nasopharyngeal cancer), soft tissue sarcomas, haematological malignancies such as Hodgkin's and non-Hodgkin's disease and diffuse large B-cell lymphoma (for example melanoma, Merkel cell carcinoma, non-small cell lung cancer (squamous and non-squamous), renal cell cancer, bladder cancer, head and neck squamous cell carcinoma and mesothelioma or for example virally induced cancers (such as cervical cancer and nasopharyngeal cancer) and soft tissue sarcomas).
[1824] 40. A method of treating or preventing a TIGIT mediated disease or condition, e.g. selected from neoplastic or non-neoplastic disease, chronic viral infections, and malignant tumours, such as melanoma, Merkel cell carcinoma, non-small cell lung cancer (squamous and non-squamous), renal cell cancer, bladder cancer, head and neck squamous cell carcinoma, mesothelioma, virally induced cancers (such as cervical cancer and nasopharyngeal cancer), soft tissue sarcomas, haematological malignancies such as Hodgkin's and non-Hodgkin's disease and diffuse large B-cell lymphoma (for example melanoma, Merkel cell carcinoma, non-small cell lung cancer (squamous and non-squamous), renal cell cancer, bladder cancer, head and neck squamous cell carcinoma and mesothelioma or for example virally induced cancers (such as cervical cancer and nasopharyngeal cancer) and soft tissue sarcomas) in a human, comprising administering to said human a therapeutically effective amount of an antibody, fragment or immunocytokine as defined in any one of Statements 1 to 37, wherein the TIGIT mediated disease or condition is thereby treated or prevented.
[1825] 41. The antibody, fragment or immunocytokine according to Statement 38, the use according to Statement 39 or the method according to Statement 40, wherein the TIGIT-mediated disease or condition is cancer.

[1826] Optionally, a DNAM-1 agaonist is further administered to the subject simultaneously or sequentially with the anti-TIGIT antibody, fragment or immunocytokine of the invention. This is useful for enhancing the desirable immune effect of DNAM-1 and inhibiting TIGIT-medated suppression of T-cells and/or NK cells as discussed herein.
[1827] 42. The antibody, fragment or immunocytokine, use or method according to Statement 41, wherein the cancer is selected from melanoma, Merkel cell carcinoma, non-small cell lung cancer (squamous and non-squamous), renal cell cancer, bladder cancer, head and neck squamous cell carcinoma and mesothelioma or is selected from virally induced cancers (such as cervical cancer and nasopharyngeal cancer) and soft tissue sarcomas.
[1828] 43. The antibody, fragment or immunocytokine according to Statement 38, the use according to Statement 39 or the method according to Statement 40, wherein the TIGIT-mediated disease or condition is a neurodegenerative disease, disorder or condition, e.g. selected from Alzheimer's disease, amyotrophic lateral sclerosis, Parkinson's disease, Huntington's disease, primary progressive multiple sclerosis, secondary progressive multiple sclerosis, corticobasal degeneration, Rett syndrome, a retinal degeneration disorder selected from age-related macular degeneration and retinitis pigmentosa; anterior ischemic optic neuropathy, glaucoma, uveitis, depression, trauma-associated stress or post-traumatic stress disorder, frontotemporal dementia, Lewy body dementias, mild cognitive impairments, posterior cortical atrophy, primary progressive aphasia and progressive supranuclear palsy or aged-related dementia, in particular, the neurodegenerative disease, disorder or condition is selected from Alzheimer's disease, amyotrophic lateral sclerosis, Parkinson's disease and Huntington's disease, for example, Alzheimer's disease.
[1829] 44. The antibody, fragment, immunocytokine method or use according to any one of Statements 36 to 43 wherein the cancer, disease or condition is a PD-L1 positive cancer, disease or condition, optionally wherein a PD-L1 inhibitor (eg, an anti-PD-L1 antibody, fragment or immunocytokine) is administered to the subject simultaneously or sequentially with the anti-TIGIT antibody, fragment of immunocytokine.
[1830] 45. The antibody, fragment, immunocytokine, use or the method according to any one of Statements 30 to 33 and 36 to 44, further comprising administering to the human or subject a further therapy, for example a further therapeutic agent, optionally wherein the further therapeutic agent is selected from the group consisting of:
   [1831] a) immune checkpoint inhibitors (such as anti-TIM-3 antibodies, anti-CTLA-4 antibodies, anti-PD-L1 antibodies, anti-PD-1 antibodies and anti-LAG-3 antibodies);
   [1832] b) immune stimulators (such as anti-OX40 antibodies, anti-GITR antibodies, anti-CD137 antibodies, anti-ICOS antibodies and anti-CD40 antibodies);
   [1833] c) chemokine receptor antagonists (such as CXCR4, CCR4 and CXCR2);
   [1834] d) targeted kinase inhibitors (such as CSF-1R or VEGFR inhibitors);
   [1835] e) angiogenesis inhibitors (such as anti-VEGF-A or Delta-like Ligand-4);
   [1836] f) immune stimulating peptides or chemokines (such as CXCL9 or CXCL10);
   [1837] g) cytokines (such as IL-15 and IL-21);
   [1838] h) bispecific T-cell engagers (BiTEs) having at least one specificity against CD3 (e.g. CD3/CD19 BiTE);
   [1839] i) other bi-specific molecules (for example IL-15-containing molecules targeted towards tumour associated antigens, for example Epidermal growth factor receptors such as EGFR, Her-2, New York Esophageal Cancer-1 (NY-ESO-1), GD2, EpCAM or Melanoma Associated Antigen-3 (MAGE-A3));
   [1840] j) oncolytic viruses (such as HSV virus (optionally which secretes GMCSF), Newcastle disease virus and Vaccinia virus);
   [1841] k) vaccination with tumour associated antigens (such as New York Esophageal Cancer-1 [NY-ESO-1], Melanoma Associated Antigen-3 [MAGE-3]);
   [1842] l) cell-based therapies (such as chimeric Antigen Receptor-T-cells (CAR-T) for example expressing anti-CD19, anti-EpCam or anti-mesothelin); and
   [1843] m) adoptive transfer of tumour specific T-cells or LAK cells,
   [1844] or optionally wherein the further therapy is chemotherapy, radiotherapy and surgical removal of tumours.
[1845] 46. A pharmaceutical composition comprising an antibody, fragment or immunocytokine as defined in any one of Statements 1 to 38 and 41 to 45 and a pharmaceutically acceptable excipient, diluent or carrier and optionally in combination with a further therapeutic agent selected from the group consisting of:
   [1846] a) other immune checkpoint inhibitors (such as anti-TIM-3 antibodies, anti-CTLA-4 antibodies, anti-PD-L1 antibodies, anti-PD-1 antibodies and anti-LAG-3 antibodies);
   [1847] b) immune stimulators (such as anti-OX40 antibodies, anti-GITR antibodies, anti-CD137 antibodies, anti-ICOS antibodies and anti-CD40 antibodies);
   [1848] c) chemokine receptor antagonists (such as CXCR4, CCR4 and CXCR2);
   [1849] d) targeted kinase inhibitors (such as CSF-1R or VEGFR inhibitors);
   [1850] e) angiogenesis inhibitors (such as anti-VEGF-A or Delta-like Ligand-4);
   [1851] f) immune stimulating peptides or chemokines (such as CXCL9 or CXCL10);
   [1852] g) cytokines (such as IL-15 and IL-21);
   [1853] h) bispecific T-cell engagers (BiTEs) having at least one specificity against CD3 (e.g. CD3/CD19 BiTE);
   [1854] i) other bi-specific molecules (for example IL-15-containing molecules targeted towards tumour associated antigens, for example Epidermal growth factor receptors such as EGFR, Her-2, New York Esophageal Cancer-1 (NY-ESO-1), GD2, EpCAM or Melanoma Associated Antigen-3 (MAGE-A3));
   [1855] j) oncolytic viruses (such as HSV virus (optionally which secretes GMCSF), Newcastle disease virus and Vaccinia virus);
   [1856] k) vaccination with tumour associated antigens (such as New York Esophageal Cancer-1 [NY-ESO-1], Melanoma Associated Antigen-3 [MAGE-3]);
   [1857] l) cell-based therapies (such as chimeric Antigen Receptor-T-cells (CAR-T) for example expressing anti-CD19, anti-EpCam or anti-mesothelin); and
   [1858] m) adoptive transfer of tumour specific T-cells or LAK cells.
[1859] 47. A pharmaceutical composition comprising the antibody, fragment or immunocytokine of any one of Statements 1 to 38 and 41 to 46, in combination with a further antibody or fragment, wherein the further antibody or fragment specifically binds
   [1860] i. human PD-L1 and optionally comprises the VH, VL, the VH and VL, heavy chain, light chain, or heavy and light chains of an antibody selected from 1D05, 84G09, 413G05 and 416E01; or
   [1861] ii. human ICOS and optionally comprises the VH, VL, the VH and VL, heavy chain, light chain, or heavy and light chains of an antibody selected from STIM003, STIM001;

[1862] or wherein the further antibody or fragment is any anti-PD-L1 or anti-ICOS antibody or fragment disclosed herein.

[1863] In an example, said selected antibody is 1D05. In an example, said selected antibody is 84G09. In an example, said selected antibody is STIM003.

[1864] In an example, the invention provides a pharmaceutical composition comprising the antibody, fragment or immunocytokine of any preceding Statement, in combination with a further antibody or fragment, wherein the further antibody or fragment specifically binds an immune checkpoint inhibitor, immune modulator or immune activator, eg, any immune checkpoint inhibitor, immune modulator or immune activator disclosed herein or in any reference incorporated herein by reference. Optionally, the further antibody or fragment is any anti-PD-L1 or anti-ICOS antibody or fragment disclosed herein.
[1865] 48. The pharmaceutical composition according to Statement 46 or 47, or a kit comprising a pharmaceutical composition as defined in Statement 46 or 47, wherein the composition is for treating and/or preventing a TIGIT-mediated condition or disease, e.g. selected from neoplastic or non-neoplastic disease, chronic viral infections, and malignant tumours, such as melanoma, Merkel cell carcinoma, non-small cell lung cancer (squamous and non-squamous), renal cell cancer, bladder cancer, head and neck squamous cell carcinoma, mesothelioma, virally induced cancers (such as cervical cancer and nasopharyngeal cancer), soft tissue sarcomas, haematological malignancies such as Hodgkin's and non-Hodgkin's disease, diffuse large B-cell lymphoma.
[1866] 49. A pharmaceutical composition according to Statement 46 or 47, or a kit comprising a pharmaceutical composition as defined in Statement 46 or 47, wherein the composition is for treating and/or preventing a neurodegenerative disease, disorder or condition, e.g. selected from Alzheimer's disease, amyotrophic lateral sclerosis, Parkinson's disease, Huntington's disease, primary progressive multiple sclerosis, secondary progressive multiple sclerosis, corticobasal degeneration, Rett syndrome, a retinal degeneration disorder selected from age-related macular degeneration and retinitis pigmentosa; anterior ischemic optic neuropathy, glaucoma, uveitis, depression, trauma-associated stress or post-traumatic stress disorder, frontotemporal dementia, Lewy body dementias, mild cognitive impairments, posterior cortical atrophy, primary progressive aphasia and progressive supranuclear palsy or aged-related dementia, in particular, the neurodegenerative disease, disorder or condition is selected from Alzheimer's disease, amyotrophic lateral sclerosis, Parkinson's disease and Huntington's disease, for example, Alzheimer's disease
[1867] 50. The pharmaceutical composition according to any one of Statements 46 to 49 in combination with, or kit according to Statement 48 or Statement 49 comprising, a label or instructions for use to treat and/or prevent said disease or condition in a human; optionally wherein the label or instructions comprise a marketing authorisation number (e.g., an FDA or EMA authorisation number); optionally wherein the kit comprises an IV or injection device that comprises the antibody or fragment.
[1868] 51. A nucleic acid (eg, DNA, RNA, cDNA or mRNA) that encodes a V_{H} domain and/or a V_{L} domain of an antibody or fragment as defined in any one of Statements 1 to 24.
[1869] 52. A nucleic acid (eg, DNA, RNA, cDNA or mRNA) (eg, according to Statement 51) comprising
   [1870] (a) a nucleotide sequence that is at least 95% identical to the sequence of SEQ ID NO: 604, 624, 644, 664, 678, 682, 686, 690, 694, 698, 702, 706, 710, 714, 718, 722, 726, 730, 734, 738, 742, 746 or 750; and/or
   [1871] (b) a nucleotide sequence that is at least 95% identical to the sequence of SEQ ID NO: 614, 634, 654, 674, 680, 684, 688, 692, 696, 700, 704, 708, 712, 716, 720, 724, 728, 732, 736, 740, 744, 748 or 752.

[1872] In one embodiment, the nucleic acid sequence is at least 70% identical to the specified SEQ ID NO. In one embodiment, the nucleic acid sequence is at least 75% identical to the specified SEQ ID NO. In one embodiment, the nucleic acid sequence is at least 95% identical to the specified SEQ ID NO. In one embodiment, the nucleic acid sequence is at least 96% identical to the specified SEQ ID NO. In one embodiment, the nucleic acid sequence is at least 97% identical to the specified SEQ ID NO. In one embodiment, the nucleic acid sequence is at least 98% identical to the specified SEQ ID NO. In one embodiment, the nucleic acid sequence is at least 99% identical to the specified SEQ ID NO. In one embodiment, the nucleic acid sequence is at least 99.5% identical to the specified SEQ ID NO.

[1873] For example, the nucleic acid comprises the a nucleotide sequence encoding a VH domain of KY01 and/or a nucleotide sequence encoding a VL domain of KY01.

[1874] For example, the nucleic acid comprises the a nucleotide sequence encoding a VH domain of KY02 and/or a nucleotide sequence encoding a VL domain of KY02.

[1875] For example, the nucleic acid comprises the a nucleotide sequence encoding a VH domain of KY03 and/or a nucleotide sequence encoding a VL domain of KY03.

[1876] For example, the nucleic acid comprises the a nucleotide sequence encoding a VH domain of KY04 and/or a nucleotide sequence encoding a VL domain of KY04.

[1877] The invention also provides:—

[1878] 51a. A nucleic acid (eg, DNA, RNA, cDNA or mRNA) that encodes a heavy chain of an antibody or fragment as defined in any one of Statements 1 to 24.

[1879] 51b. A nucleic acid (eg, DNA, RNA, cDNA or mRNA) (eg, according to Statement 51a) comprising a nucleotide sequence that is at least 70% identical to the sequence of SEQ ID NO: 606, 626, 646 or 666.

[1880] 51c. A nucleic acid (eg, DNA, RNA, cDNA or mRNA) that encodes a light chain of an antibody or fragment as defined in any one of Statements 1 to 24.

[1881] 51d. A nucleic acid (eg, DNA, RNA, cDNA or mRNA) (eg, according to Statement 51c) comprising a nucleotide sequence that is at least 70% identical to the sequence of SEQ ID NO: 616, 636, 656 or 676.
[1882] 53. A nucleic acid that encodes a heavy chain or a light chain of an antibody as defined in any one of Statements 1 to 24.
[1883] 54. A vector comprising the nucleic acid of any one of Statements 51 to 53; optionally wherein the vector is a CHO or HEK293 vector.
[1884] 55. A host cell comprising the nucleic acid of any one of Statements 32 to 34 or the vector of Statement 54.

[1885] In these Statements, antibodies or fragments may include or may not include bispecific antibodies. In one embodiment, in these Statements, antibodies or fragments includes bispecific antibodies. In one embodiment, the bispecific antibody is in a FIT-Ig or mAb² format. In one embodiment, a bispecific antibody does not include a FIT-Ig format. In one embodiment, a bispecific antibody does not include a mAb² format. In one embodiment, a bispecific antibody does not include either a FIT-Ig format or a mAb² format. In one embodiment, the antibody or fragment in these Statements includes a bispecific antibody, but does not include a bispecific antibody having a FIT-Ig format. In one embodiment, the antibody or fragment in these Statements includes a bispecific antibody, but does not include a bispecific antibody having a mAb² format. In one embodiment, the antibody or fragment in these Statements includes a bispecific antibody, but does not include a bispecific antibody having a FIT-Ig format or a mAb² format. In another embodiment, in these Statements, antibodies or fragments include dual binding antibodies. Such formats are described above in relation to anti-PD-L1 antibodies and such disclosures apply mutatis mutandis to the present anti-TIGIT antibodies and fragments.

[1886] Preferably, an antibody or a fragment thereof that specifically binds to a hTIGIT does not cross-react with other antigens (but may optionally cross-react with TIGIT of a different species, e.g., rhesus, cynomolgus, or murine). An antibody or a fragment thereof that specifically binds to a TIGIT antigen can be identified, for example, by immunoassays, BIAcore™, or other techniques known to those of skill in the art. An antibody or a fragment thereof binds specifically to a hTIGIT antigen when it binds to a hTIGIT antigen with higher affinity than to any cross-reactive antigen as determined using experimental techniques, such as radioimmunoassays (RIA) and enzyme-linked immunosorbent assays (ELISAs). Typically, a specific or selective reaction will be at least twice background signal or noise and more typically more than 10 times background. See, e.g. Paul, ed., 1989, Fundamental Immunology Second Edition, Raven Press, New York at pages 332-336 for a discussion regarding antibody specificity.

[1887] As provided in the Statements or aspects herein, an anti-TIGIT antibody or immunocytokine may bind to TIGIT, e.g. human TIGIT with a K_{D} of less than 50 nM, less than 40 nM, less than 30 nM as determined by surface plasmon resonance. Another embodiment, anti-TIGIT antibody or immunocytokine may bind to TIGIT, e.g. human TIGIT with a K_{D} of less than 20 nM, less than 15 nM, less than 10 nM as determined by surface plasmon resonance. anti-PD-L1 antibody or immunocytokine may bind to TIGIT, e.g. human TIGIT with a K_{D} of less than 8 nM, less than 5 nM, less than 4 nM, less than 3 nM, less than 2 nM or less than 1 nM as determined by surface plasmon resonance. The K_{D} may be 0.9 nM or less, 0.8 nM or less, 0.7 nM or less, 0.6 nM or less, 0.5 nM or less, 0.4 nM or less, 0.3 nM or less, 0.2 nM or less, or 0.1 nM or less.

[1888] In another embodiment, the K_{D} is within a range of 0.01 to 1 nM, or a range of 0.05 to 2 nM, or a range of 0.05 to 1 nM. The K_{D} may be with regard to hTIGIT, cynomolugus monkey (ie, “cyno”) TIGIT and/or mouse TIGIT.

[1889] In another embodiment, the anti-TIGIT antibodies described herein have a K_{ON} rate (e.g. as measured by SPR, e.g. at 25° C. or at 37° C.) of approximately 0.5 to 10 μM, for example approximately 1 to 8 μM or approximately 1 to 7 μM. In another embodiment, the K_{ON} rate is approximately 1 to 5 μM, e.g. approximately 1 μM, approximately 1.5 μM, approximately 2 μM, approximately 2.5 μM or approximately 3 μM. In another embodiment, the K_{ON} rate is approximately 3.5 μM, approximately 4 μM, approximately 4.5 μM, approximately 5 μM or approximately 5.5 μM.

[1890] In another embodiment, the anti-TIGIT antibodies described herein have a K_{OFF} rate (e.g. as measured by SPR, e.g. at 25° C. or at 37° C.) of approximately 0.01 to 100 mM, for example approximately 0.1 to 50 mM or approximately 0.5 to 50 mM. In another embodiment, the K_{OFF} rate is approximately 0.5 to 10 mM, or approximately 0.5 to 10 mM, e.g. approximately 1 mM, approximately 2 mM, approximately 3 mM, approximately 4 mM or approximately 5 mM. In another embodiment, the K_{OFF} rate is approximately 0.6 mM, approximately 0.7 mM, approximately 0.8 mM or approximately 0.9 mM.

[1891] Contact amino acid residues involved in the interaction of antibody and antigen, such as TIGIT, may be determined by various known methods to those skilled in the art.

[1892] In one embodiment, sequential replacement of the amino acids of the antigen sequence as described above for PD-L1 is used mutatis mutandis in the present invention relating to TIGIT.

[1893] In one embodiment, protein crystallography to determine contact residues between antibody and antigen (i.e. to determine the epitope to which the antibody binds) as described above for PD-L1 is used in the present invention relating to TIGIT.

[1894] In one embodiment, if the antibody recognises a linear epitope, short peptides based on the antigen sequence can be produced and binding of the antibody to these peptides can be assessed using standard techniques, as described above for PD-L1 is used in the present invention relating to TIGIT.

[1895] In one embodiment, limited proteolytic digestion and mass spectrophotometry can be used to identify binding epitopes as described above for PD-L1 is used in the present invention relating to TIGIT.

[1896] In one embodiment, the contact residues of the epitope are identified by X-ray crystallography. In one embodiment, the contact residues of the epitope are identified by cryo-electro microscopy. In one embodiment, the contact residues of the epitope are identified by a combination of limited proteolytic digestion and mass spectrometry.

[1897] In another embodiment, the anti-TIGIT antibodies (and immunocytokines) described in herein provide improved transient expression levels over other anti-TIGIT antibodies and immunocytokines. Thus, in one embodiment, the anti-TIGIT antibody (or immunocytokine) is expressed in a HEK293 cell, e.g. a HEK293T cell, at an expression level of approximately 100 μg/mL, or in a range of approximately 100 to 350 μg/mL. In another embodiment, the expression level is above approximately 350 μg/mL.

[1898] In another embodiment, the anti-TIGIT antibody (or immunocytokine) is expressed in a CHO cell, e.g. an Expi-CHO cell, at an expression level of approximately 100 μg/mL, or in a range of approximately 100 to 350 μg/mL. In another embodiment, the expression level is above approximately 350 μg/mL.

[1899] In another embodiment, the anti-TIGIT antibody (or immunocytokine) is expressed in a CHO cell, e.g. an Expi-CHO cell or a CHO-E7 EBNA cell, at an expression level of approximately 100 μg/mL, or in a range of approximately 100 to 350 μg/mL. In another embodiment, the expression level is above approximately 350 μg/mL. The antibody for example, comprises the V_{H} and V_{L} domains of any one of KY01-23 (eg, KY01), formatted as a human IgG1 or human IgG4.

[1900] In any of these expression systems, the expression is carried out of a scale of between approximately 0.5 mL and 3 mL, for example between approximately 0.5 mL and 2 mL. In any of these expression systems, the anti-TIGIT antibody (or immunocytokine) may be expressed from a pTT5 vector. In any of these expression systems, the anti-TIGIT antibody (or immunocytokine) may be expressed in conjunction with a lipid transfection reagent, and may optionally be expressed in a CHO cell, e.g. an Expi-CHO cell. In any of these expression systems, the anti-TIGIT antibody (or immunocytokine) may be expressed in conjunction with a PEI transfection reagent, and may optionally be expressed in a CHO cell, e.g. an CHO-E7 EBNA cell. In any of these expression systems, the anti-TIGIT antibody (or immunocytokine) may be expressed in conjunction with a helper plasmid (e.g. an AKT helper plasmid), and may optionally be expressed in a CHO cell, e.g. an CHO-E7 EBNA cell.

[1901] In any of these expression systems, the expression level is between approximately 100 μg/mL and approximately 1500 μg/mL, for example between approximately 100 μg/mL and approximately 1000 μg/mL, or between approximately 200 μg/mL and approximately 1000 μg/mL, or between approximately 350 μg/mL and approximately 1000 μg/mL. In any of these expression systems, the lower limit of expression may be approximately 100 μg/mL, approximately 200 μg/mL, approximately 300 μg/mL, or approximately 400 μg/mL. In another embodiment, the lower limit of expression may be approximately 500 μg/mL, approximately 600 μg/mL, approximately 700 μg/mL, or approximately 800 μg/mL. In any of these expression systems, the upper limit of expression may be approximately 2000 μg/mL, approximately 1800 μg/mL, approximately 1600 μg/mL, or approximately 1500 μg/mL. In another embodiment, the upper limit of expression may be approximately 1250 μg/mL, approximately 1000 μg/mL, approximately 900 μg/mL, or approximately 800 μg/mL.

[1902] In another embodiment, the expression system is a Lonza expression system, e.g. Lonza X-Ceed® system. In the Lonza expression system, the expression may be carried out at a scale of approximately 30 mL to 2 L, for example 50 mL to 1 L, or 1 L tp 2 L. In the Lonza expression system, the anti-TIGIT antibody (or immunocytokine) may be expressed in conjunction with electroporation, and optionally without any helper plasmids. In the Lonza expression system, the anti-TIGIT antibody (or immunocytokine) may be expressed at a level of approximately 1 g/L, or approximately 900 mg/L, or approximately 800 mg/L, or approximately 700 mg/L. In another embodiment, In the Lonza expression system, the anti-TIGIT antibody (or immunocytokine) may be expressed at a level of approximately 600 mg/L or approximately 500 mg/L or approximately 400 mg/L. In the Lonza expression system, the anti-TIGIT antibody (or immunocytokine) may be expressed at a level of between approximately 400 mg/L and approximately 2 g/L, for example between approximately 500 mg/L and approximately 1.5 g/L, or between approximately 500 mg/L and approximately 1 g/L. In another embodiment, the expression level is above 1 g/L. In another embodiment, the anti-TIGIT antibodies provide improved half-life over other anti-TIGIT antibodies.

[1903] in one embodiment, the antibody or fragment is a human antibody or fragment. In one embodiment, the antibody or fragment is a fully human antibody or fragment. In one embodiment, the antibody or fragment is a fully human monoclonal antibody or fragment.

[1904] Contact amino acid residues involved in the interaction of antibody and antigen may be determined by various known methods to those skilled in the art, such as alanine scanning, protein crystallography, mass spectrophotometry or any other technique described herein for anti-PD-L1 antibodies. The feaures of such disclosures apply mutatis mutandis to anti-TIGIT antibodies, fragments and immunocytokines on the invention.

[1905] The anti-TIGIT immunocytokine (ICK), antibody or fragment according to the invention may comprise a constant region, such as a human constant region, for example an effector-null human constant region, e.g. an IgG4 constant region or an IgG1 constant region, optionally wherein the constant region is IgG4-PE (Seq ID No:199), or a disabled IgG1 as defined in Seq ID No:205.

[1906] In other embodiments, the ICK, antibody or fragment is any of the isotypes or constant regions as defined hereinabove. In one embodiment, the constant region is wild-type human IgG1 (Seq ID No:340). For example, the constant region is an effector-enabled IgG1 constant region, optionally having ADCC and/or CDC activity. In one embodiment, the constant region is engineered for enhanced ADCC and/or CDC and/or ADCP. In another embodiment, the constant region is engineered for enhanced effector function.

[1907] The IgG4 constant region may be any of the IgG4 constant region amino acid sequences, or encoded by any of the nucleic acid sequences of Seq ID Nos:192 to 203. A heavy chain constant region may be an IgG4 comprising both the Leu235Glu mutation and the Ser228Pro mutation. This “IgG4-PE” heavy chain constant region (Seq ID Nos:199, encoded by Seq ID Nos:198, 200 and 201) is effector null.

[1908] An alternative effector null human constant region is a disabled IgG1 being an IgG1*01 allele comprising the L235A and/or G237A mutations (e.g. LAGA, Seq ID No:205, encoded by Seq ID No:204). In one embodiment, the antibodies or antibody fragments disclosed herein comprise an IgG1 heavy chain constant region, wherein the sequence contains alanine at position 235 and/or 237 (EU index numbering).

[1909] The potency of Fc-mediated effects may be enhanced by engineering the Fc domain by any of the techniques described herein for anti-PD-L1 antibodies. In another embodiment, the increase in affinity for Fc-receptors using any of the techniques described herein for anti-PD-L1 antibodies. In another embodiment, the antibodies and fragments disclosed herein may comprise a triple mutation (M252Y/S254T/T256E) which enhances binding to FcRn. The enhancement of CDC may be achieved by any of the techniques described herein for anti-PD-L1 antibodies. These disclosures and all others described herein for engineering the constant regions of anti-PD-L1 antibodies apply mutatis mutandis to the anti-TIGIT ICKs, antibodies and fragments of the invention.

[1910] In an example, the antibody is a human IgG4 antibody that is capable of inhibiting the interaction with CD155 to enhance T-cell and/or NK anti-tumour activity in a subject for treating cancer.

[1911] In an example, the antibody is a human IgG1 antibody for binding TIGIT expressed on Tregs and/or tumour cells in a subject for treating cancer and/or for reducing immune-suppressive signalling in the tumour microenvironment.

[1912] In an example, the anti-TIGIT ICKs, antibodies and fragment of the invention comprises a murine constant region. In other embodiments, the constant region may be of any non-human mammalian origin, e.g. rat, mouse, hamster, guinea pig, dog, cat, horse, chicken, llama, dromedary, etc. In one embodiment, the constant region is a rat constant region. In another embodiment, the constant region is a llama constant region. The murine constant region may be any of the isotypes or alleles described hereinabove.

### 10. Examples

### Example 1—Antigen Preparation, Immunization Procedures, and Hybridoma Generation

[1913] The following example provides a detailed description of the generation and identification of a panel of anti-human PD-L1 monoclonal antibodies using the KyMouse™ system (see, e.g., WO2011/004192, WO2011/158009 and WO2013/061098). To this end, genetically engineered mice containing a large number of human immunoglobulin genes were immunized with soluble recombinant human PD-L1 or surface expressed human PD-L1 displayed on mouse embryonic fibroblast (MEF) cells. Various immunization regimens, including conventional intraperitoneal injections as well as a rapid immunisation at multiple sites (RIMMS) regimen were set up, boosting animals over several weeks (see detailed methods below). At the end of each regimen, secondary lymphoid tissue such as the spleen, and in some cases, the lymph nodes were removed. Tissues were prepared into a single cell suspension and fused with SP2/0 cells to generate a stable hybridoma cell line.

[1914] Materials and Methods

[1915] a) Generation of Stably Transfected MEF and CHO-S Cells Expressing Human PD-L1:

[1916] Full length human PD-L1 sequence (SEQ ID No:1 also known as B7-H1) was codon optimized for mammalian expression and cloned into an expression vector under the CMV promoter flanked by 3′ and 5′ piggyBac specific terminal repeat sequences, facilitating stable integration into the cell genome (see: “A hyperactive piggyBac transposase for mammalian applications”; Yusa K., et al., Proc. Natl. Acad. Sci. USA., 108(4): 1531-6, 2011 Jan. 25). Furthermore, the expression vector contained a puromycin selection cassette to facilitate stable cell line generation. The human PD-L1 expression plasmid was co-transfected with a plasmid encoding piggyBac transposase into an in-house derived mouse embryonic fibroblast (MEF) cell line (embryos used to generate this line were obtained from a 12955 crossed to C57/BL6 female mouse) and CHO-S cells using the FreeStyle Max transfection reagent (Invitrogen) according to manufacturer instructions. 24 hours after transfection, the media was supplemented with puromycin and grown for at least two weeks to select a stable cell line with complete medium being exchanged every 3 to 4 days. The expression of hPD-L1 was assessed by flow cytometry using an anti-human PD-L1-PE conjugated antibody (eBioscience). Complete MEF media was made up of Dulbecco's Modified Eagle's Medium (Gibco) supplemented with 10% v/v fetal bovine serum (Gibco). Complete CHO-S media was made up of CD-CHO media (Gibco) supplemented with 8 mM Glutamax (Gibco). Transfected CHO cells were used for screening purposes (see Example 2).

[1917] b) Preparation of MEF Cells for Mouse Immunizations:

[1918] Cell culture medium was removed and cells washed once with 1×PBS. Cells were treated for 5 minutes with trypsin to loosen cells from tissue culture surface. Cells were collected and trypsin neutralized by the addition of complete MEF media. Cells were then centrifuged at 300 g for 10 minutes and washed with 25 mL of 1×PBS. Cells were counted and resuspended at the appropriate concentration in 1×PBS.

[1919] c) Immunisations with PD-L1

[1920] Genetically engineered Kymouse™ HK strain, containing human immunoglobulin genes producing human kappa (HK) light chain antibodies (Lee et al, Nature Biotechnology, 32, 6-363, 2014) were immunized by various immunisation regimens for the generation of human anti-PD-L1 antibodies.

[1921] Mice were immunised either with soluble recombinant hPD-L1 (R&D Systems, 156-B7, Fc chimera) using a modified sub-cutaneous immunisation procedure (RIMMS; modified after Kilpatrick et al, “Rapid development of affinity matured monoclonal antibodies using RIMMS”; Hybridoma. 1997 August; 16(4):381-9, hereafter referred to as KM031), or by using soluble recombinant hPD-L1 in a prime-rest-boost regime by sub-cutaneous administration (hereafter referred to as KM032) or by combination of soluble recombinant hPD-L1 and stably transfected MEF cells expressing hPD-L1 administered intra-peritoneally (hereafter referred to as KM033). Sigma Adjuvant System was used for all immunisations and rest intervals were usually between 2 and 3 weeks. Where protein was used as the immunogen, CpG (Hokkaido System Science) was also administered. Serum from serial or terminal blood samples were analysed for the presence of specific antibodies by ELISA and flow cytometry and the titre data was used (where possible) to select mice to be used for hybridoma fusions. A further regimen, KM042 immunising with MEF-PD-L1 cells alone, or protein alone in a prime-rest-boost setting, was also performed, but out of six antibodies confirmed to bind to hPD-L1, no neutralising antibodies were identified.

[1922] d) Cloning and Expression of Recombinant Proteins

[1923] DNA sequences encoding PD-L1 were purchased as synthetic DNA strings and cloned into appropriate mammalian expression vectors for transient expression in Expi293 and CHO cells. The sequence listing shows the sequences of the antigens, where available, and affinity tags for purification/labelling (shown in bold and underlined), see Seq ID Nos:3 to 6.

[1924] e) Determining Serum Titre by Reverse PD-L1 ELISA Protocol

[1925] Titres in mouse serum samples were determined using a reverse PD-L1 ELISA protocol. Anti-mouse IgG capture antibody (Southern Biotech) (4 μg/mL diluted in PBS, 50 μL/well) was adsorbed to 96 well low auto-fluorescent, high protein binding plates (Costar) overnight at 4° C. Excess IgG was removed by washing three times with PBS-Tween (0.1% v/v) and the wells were blocked with 1% w/v bovine serum albumin (BSA, Sigma) in PBS for 1 hour at room temperature, after which plates were washed three times with PBS-Tween (0.1% v/v). Serial ten-fold dilutions of mouse serum were prepared, diluting samples in reagent diluent (0.1% w/v BSA/PBS). 50 μL/well of this titration was then added to ELISA plates. To determine the change in activity level due to immunization, serum from each animal prior to immunization was diluted to 1/100 in reagent diluent and 50 μL/well added to the ELISA plate. Following incubation, plates were washed as before to remove unbound proteins. Biotinylated hPD-L1-his (in-house generated protein, Seq ID No: 3, labelled in-house using Sulfo-NHS-LC-Biotin (Thermo)), used at 100 ng/mL in reagent diluent; 50 μL/well) was then added to the plates and incubated at room temperature for 1 hour. Unbound biotinylated hPD-L1 was removed by washing with PBS-Tween (0.1% v/v), while the remaining biotinylated hPD-L1 was detected by addition of streptavidin-HRP (Sigma) diluted 1/10,000 in reagent diluent. Following incubation for 1 hour at room temperature, plates were washed as described before and 50 μL TMB (Sigma) was added to the plate. The reaction was stopped by adding 50 μL 1M sulphuric acid (Fluka Analytical). The OD at 450 nm was measured on an Envision plate reader (PerkinElmer). Titres were not performed for KM032 as only one mouse was immunised. For KM031, titres were performed on terminal bleeds only.

[1926] f) Determination of Serum Titres by Flow Cytometry Using CHO-S Expressed hPD-L1

[1927] CHO-S cells expressing hPD-L1, suspended in FACS buffer (PBS+1% w/v BSA+0.1% w/v sodium azide) were distributed to a 96-well, V-bottom plate (Greiner) at a density of 10⁵ cells per well. A titration of mouse serum was prepared, diluting samples in FACS buffer. 25 μL/well of this titration was then added to the cell plate. To determine the change in activity level due to immunization, serum from each animal prior to immunization was diluted to 1/100 in FACS buffer and 25 μL/well added to the cells. Cells were incubated at 4° C. for 1 hour. Cells were washed twice with 150 μL PBS, centrifuging after each wash step and aspirating supernatant (centrifuged at 300×g for 3 minutes). To detect antibody binding, PE goat-anti-mouse IgG (Jackson ImmunoResearch) was diluted 1/500 in FACS buffer and 50 μL was added to the cells. Cells were incubated 1 hour at 4° C. in the dark, then washed twice with 150 μL PBS as above. To fix cells, 100 μL 2% v/v paraformaldehyde was added and cells incubated for 30 minutes at 4° C. Cells were then pelleted by centrifugation at 300×g and the plates resuspended in 100 μL of FACS buffer. PE signal intensity (geometric mean) was measured by flow cytometry using a BD FACS Array instrument. Titres were performed by this method for KM033 only.

[1928] q) Murine Tissue Isolation and Preparation

[1929] Following final boost, mice were culled and spleens were excised from immunized mice, washed in 1×PBS and kept on ice until further processing. Tissues were prepared in buffer containing 1×PBS (Invitrogen) and 3% heat-inactivated FBS (Invitrogen). Splenocytes were dispersed by mashing the tissue through a 45 pm strainer (BD Falcon) and rinsing with 30 mL 3% FBS/PBS buffer before centrifugation at 700 g for 10 minutes at 4° C. To remove red blood cells, the pelleted splenocytes were resuspended in 4 mL Red Blood Cell Lysis Buffer (Sigma). After 4 minutes of incubation, the lysis reaction was stopped by addition of 3% FBS/1×PBS buffer. Cell clumps were filtered out with a 45 μm strainer. The remaining splenocytes were pelleted for further procedures. For KM031 and KM032, axillary, inguinal and mesenteric lymph nodes were also removed and placed in sterile 1×PBS on ice until further processing. The lymph nodes were processed separately from splenocytes. Lymph node cells were prepared as above, but did not undergo red blood cell lysis. The remaining lymph node cells were pelleted for further procedures.

[1930] h) Hybridoma Fusion

[1931] Spleen and lymph node cells were pooled from KM031 and also from KM032 and subjected to a negative selection method using the MACS® Separation system. Briefly, where lymph nodes were used those cells were pooled with the splenocytes from the corresponding mice after red blood cell lysis and total cell number determined. Cells were resuspended in 100 μL 3% FBS/PBS buffer per 10⁷ cells, before adding 10 μL of Pan B Cell Biotin-Antibody Cocktail (Cat #130-095-813) per 10⁷ total cells and 10 μL of anti-IgD-Biotin antibody (Cat #130-096-979) and incubated for 10 minutes at 4° C. 2 mL FBS/PBS buffer was added and the cells were spun down at 700 g for 10 minutes. The supernatant was aspirated completely and 100 uL fresh buffer was added, then 30 uL Anti-Biotin MicroBeads (Cat #130-047-302) was added per 10⁷ cells along with 7 μL Anti-Mouse IgM MicroBeads (Miltenyi Biotec). The cells were incubated for 15 minutes in the refrigerator. The cells/MicroBeads mixture was then applied to a pre-wetted LD column (Miltenyi Biotec) placed in a magnetic MACS Separator and washed with 3% FBS/PBS buffer. The unlabelled cells that flowed through the column were collected in 3% FBS/PBS buffer.

[1932] KM033 cells were subjected to a positive selection method using the MACS® Separation system. After red blood cell lysis, splenocytes were resuspended in 80 μL 3% FBS/PBS buffer per 10⁷ cells, before adding anti-mouse IgG1 (Cat #130-047-101) plus anti-mouse IgG2a+b MicroBeads (Cat #130-047-201) and incubated for 15 minutes at 4° C. The cell/MicroBead mixture was then applied to a pre-wetted LS column (Miltenyi Biotec) placed in a magnetic MACS Separator and washed with 3% FBS/PBS buffer. IgG positive cells were collected in the labelled, column-bound fraction in 3% FBS/PBS buffer.

[1933] Enriched B-cells were treated with CpG (Hokkaido System Science) overnight (final concentration 25 μM) and the following day washed once in BSA fusion buffer (0.3 M D-Sorbitol, 0.11 mM calcium acetate hydrate, 0.5 mM magnesium acetate tetrahydrate and 0.1% BSA (v/w), adjusted to pH 7.2). Washed cells were resuspended in 200 μL BSA fusion buffer and cell count determined. SP2/0 cells were treated in the same way, but washed twice instead of once with BSA fusion buffer. B-cells fused at a ratio of 3:1 with SP2/0 myeloma cells by electrofusion using a BTX ECM 2001 Electro Cell Manipulator (Harvard Apparatus). Each fusion was left overnight in recovery medium (Dulbecco's Modified Eagle's Medium (high glucose, no phenol red) supplemented with OPI (Sigma), 1×L-Glutamax (Gibco), 20% FBS (Gibco, batch-tested for hybridoma) and 0.05 mM 2-mercaptoethanol), then resuspended in 1 part recovery medium and 9 parts semi-solid medium (ClonaCell-HY Hybridoma Selection Medium D, Stemcell Technologies) and seeded onto 10 cm petri dishes. Visible colonies were picked 12 days later into 96-well plates and cultured for another 2 to 3 days prior to screening.

### Example 2—Hybridoma Supernatant Screening

[1934] After generation of hybridoma clones, the hybridoma supernatant was assessed in a sequential primary and secondary screen and appropriate hybridoma clones selected based on criteria of antibody binding to human PD-L1 and receptor neutralization activity. In the screening cascades described, 9317 hybridoma clones were tested and 120 identified as primary hits. Thereafter, 36 hybridoma clones were confirmed by using secondary screening criteria (see details in Materials and Methods and Table 1). Among the clones identified by secondary screen, four clones were selected by the inventors to be part of the antibody shortlist, dependent upon desired selection criteria (see details in Example 3).

[1935] Materials and Methods

[1936] a) Primary Screen—Binding to Cell-Expressed Human PD-L1

[1937] Supernatants collected from hybridoma cells were screened for the ability of secreted antibodies to bind to hPD-L1 expressed on the surface of CHO-S cells. To determine CHO-S hPD-L1 binding, cells were plated in black-walled, clear-bottom tissue culture treated 384-well plates (Costar) at 1×10⁴/well in 80 μL F12 media (Gibco) supplemented with 10% FBS (Gibco) and cultured overnight at 37° C., 5% CO₂. Culture media was removed from 384-well assay plates. At least 5 μL of hybridoma supernatant or 5 μL MIH1 at 2 μg/mL in hybridoma maintaining media (HMM) or isotype IgG1 control antibody (referred to in some instances as Cm7, Sigma M9269, at a final concentration of 1 μg/mL) diluted in HMM were added to each well. HMM was made up of Advanced DMEM (Gibco) supplemented with 1× Glutamax (Gibco), 20% v/v FBS (Gibco), 0.05 mM β-Mercaptoethanol, 1×HT supplement (Gibco), and 1× penicillin/streptomycin (Gibco). 45 μL FACS buffer containing 500 ng/mL IRDye 800CW anti-Mouse Ab (LICOR) and 0.2 μM DRAQS (Biostatus) was added to each well. DRAQS was not added to background wells. Plates were incubated for 1 hour at 4° C. Supernatant was aspirated and 25 μL 4% v/v paraformaldehyde added and plates were incubated for 15 minutes at room temperature. Plates were washed twice with 100 μL PBS and then the wash buffer was completely removed. Fluorescence intensity was read by scanning plates using an Odyssey Infrared Imaging System (LI-COR®). Anti-mouse binding (800 nm channel) was normalised to cell number (700 nm channel) according to the LI-COR® recommended algorithm. Percent effect was calculated as detailed below (Equation 1). Total binding was defined using reference antibody at a final assay concentration of 0.2 μg/mL. Non-specific binding was defined using mouse IgG1 isotype control (Sigma) at a final assay concentration of 0.2 μg/mL. Criteria for hit selection were based on assay signal and visual inspection of scanned plates.

$$Calculation of Percentage Effect from Primary Screen ( LI \text{-} COR ) and HTRF$$

$$Using 800 \% Resp values ( LI \text{-} COR ) or 665 \text{/} 620 nm ratio ( see Equation 2 ) ( HTRF ) Percent effect = \frac{( sample well - non \text{-} specific binding )}{( total binding - non \text{-} specific binding )} \times 100 \\ Non \text{-} specific binding = values from wells containing isotype control mouse IgG 1 \\ Total Binding = values from wells containing reference antibody \qquad Equation 1$$

[1938] b) Primary Screen: Binding to Recombinant Human PD-L1

[1939] In parallel to screening for binding to CHO-S expressed PD-L1, supernatants collected from hybridoma wells were screened for the ability of secreted antibodies to bind to hPD-L1 expressed as a recombinant protein (produced in-house). Binding of secreted antibodies to recombinant PD-L1 were identified by HTRF® (Homogeneous Time-Resolved Fluorescence, Cisbio) assay format using biotinylated hPD-L1. 10 μL hybridoma supernatant was transferred to a white 384 well, low-volume, non-binding surface polystyrene plate (Greiner). 5 μL 230 nM biotinylated hPD-L1 his diluted in HTRF assay buffer (PBS (Sigma)+0.53 M KF (Sigma)+0.1% w/v BSA (Sigma)) was pre-incubated with 10 μL hybridoma supernatant or 10 μL reference antibody diluted to 3.3 nM working concentration for 1 hour at room temperature. For negative control wells, 10 μL HMM was added. Streptavidin D2 (Cisbio), and goat anti-mouse IgG (Southern Biotech) labelled with Europium cryptate (Cisbio) were both diluted 1/100 in HTRF assay buffer, and 5 μL. of this mixture added to all wells. The plate was left to incubate in the dark for 2 hours prior to reading time resolved fluorescence at 620 nm and 665 nm emission wavelengths using an EnVision plate reader (Perkin Elmer). More details of the HTRF® assay technology can be found in Mathis (1995) Clinical Chemistry 41(9), 1391-1397.

[1940] Data were analysed by calculating 665/620 ratio and percent effect for each sample according to Equation 2 and Equation 1 respectively.

665/620 ratio=(sample 665/620 nm value)×10000 Equation 2: Calculation of 665/620 ratio

[1941] In general, criteria for hit selection were based on greater than or equal to 10 percent effect. In some instances, hit selection was based on greater than or equal to 20 percent effect.

[1942] Progression to secondary screen was based on a combination of data from recombinant PD-L1 binding hits and binding to human PD-L1 expressed on CHO cells.

[1943] c) Secondary Screen: Binding to Cell Expressed Recombinant Human PD-L1 or Natively Expressed hPD-L1 and Binding Affinity

[1944] To determine whether wells selected using the primary screen selection criteria had the required characteristics set by the inventors, a number of assays were performed. Hybridoma clones selected as hits from primary screening were cultured for 3 days and the supernatants collected from hybridoma cells were tested to assess whether the secreted antibodies that bind to in some cases CHO-S expressed hPD-L1, or in some cases ES2 cells. In addition, the ability to neutralise recombinant hPD-1 Fc, binding to CHO-S hPD-L1 or ES2 cells was also assessed. Binding of antibodies to human PD-L1 by SPR was also tested.

[1945] d) Binding to Cell Expressed hPD-L1 and Neutralisation and hPD-L1 Binding to PD-1

[1946] Binding of hybridoma supernatants was tested for ability to bind to either CHO-S cells expressing hPD-L1 or ES2 cells. CHO-S cells expressing hPD-L1 (generated in-house), or ES2 cells (ATCC CRL-1978) natively expressing hPD-L1 were diluted in FACS buffer and were distributed to a 96-well, V-bottom plate (Greiner) at a density of 0.5 to 1×10⁵ cells per well. Cells were washed with 150 μL PBS and centrifuged at 300 g for 3 minutes. Supernatant was aspirated and 150 μL PBS added. This wash step was repeated.

[1947] 50 μL hybridoma supernatant or purified hybridoma material was added to the washed cells, to which 500 ng/mL human PD-1 Fc (in-house, Seq ID No:6) was added. Reference antibody was added to medium at 2 μg/mL. Where purified material was used, titrations were prepared from a top concentration of 600 nM before addition to cells. When supernatants were used, neat supernatant, and three serial two-fold dilutions were added to cells. Cells were incubated at 4° C. for 30 minutes. Cells were washed twice with 150 μL FACS buffer, centrifuging at 300 g for 3 minutes after each wash step and aspirating supernatant.

[1948] To detect antibody and receptor binding, 50 μL goat anti-human IgG-PE (Jackson ImmunoResearch) and APC anti-mouse IgG (Jackson ImmunoResearch) diluted 1/500 in FACS buffer was added to the cells. Cells were incubated for 30 minutes at 4° C. in the dark. Cells were washed twice as above and resuspended in FACS buffer for analysis. PE and APC signal intensity (geometric mean) was measured by flow cytometry using a BD FACS Array instrument. Data was plotted as geometric mean values without further calculation.

[1949] e) Determination of Affinity by Surface Plasmon Resonance

[1950] Label-free surface plasmon resonance (SPR) analysis was carried out on the ProteOn XPR36 (BioRad) array SPR machine. An anti-mouse IgG capture surface was created on a GLC biosensor chip using amine coupling of an anti-mouse IgG from GE Healthcare. Test antibodies were captured on this surface and human PD-L1 (in-house) was used as the analyte at 256 nM, 64 nM, 16 nM, 4 nM and 1 nM. The assay was carried out at 25° C. using HBS-EP (Teknova H8022). Buffer alone was used to reference the binding sensorgrams. The data was analysed using the 1:1 model inherent to the ProteOn XPR36 analysis software. In some instances, hybridoma supernatants were used as the source of antibody; in other instances, antibody was purified from hybridoma supernatant prior to analysis (see below). In some instances, a Protein A/G capture surface was used. This was created on a GLM biosensor chip using amine coupling of Protein A/G from Biorbyt.

[1951] f) Purification of Antibodies from Hybridoma Supernatant

[1952] Protein G resin in a gravity-flow column was first washed with water, then 50 mM sodium hydroxide or IgG Elute (Pierce) and was then equilibrated with tissue culture grade PBS. Clarified hybridoma supernatant containing 10% v/v 10× tissue culture grade PBS was applied several times to the equilibrated protein G column. Resin was washed with tissue culture grade PBS to remove unbound material. Antibody was then eluted with IgG Elute (Pierce) and the eluted fraction was then neutralized with 100 mM final TRIS, at pH 8.0. The eluted fraction was then concentrated down to <1.5 mL by centrifugation in a 10 kDa cut-off centrifugal filter unit. Tissue culture grade PBS was then added and the sample was concentrated down again to <1.5 mL. Protein concentration was quantified at OD₂₈₀ using the molar extinction coefficient inherent to the Nanodrop for IgG. Finally, sample was analysed on a SDS-PAGE to assess purity.

TABLE 1
Summary of hybridoma clone screening

| | | Number of | Number of | Number of |
|---|---|---|---|---|
| | Number of | Primary hits | secondary | Lead |
| Experiment | hybridoma | cherry | hits | Candidate |
| ID | screened | picked | confirmed | mAbs |
| KM031 | 1872 | 41 | 4 | 0 |
| KM032 | 115 | 14 | 6 | 1 |
| KM033 | 7330 | 66 | 26 | 1 |

### Example 3—Antibody Shortlist Selection Criteria

[1953] Binding to hPD-L1 natively expressed on ES2 cells, and neutralisation of recombinant human PD-1 binding to ES2 cells were used as criteria for secondary screen hit selection. Hits to progress to purification and further characterisation were determined by a combination of high affinity for human PD-L1 and neutralisation capacity.

[1954] After the selection and characterization of shortlisted antibodies, their fully-human variable domains were recovered using RT-PCR using a mixture of forward and reverse primers. Antibodies were reformatted into a human IgG1 backbone and expressed using a transient expression system in CHO-S cells.

[1955] Materials and Methods

[1956] a) RNA Isolation from Hybridoma Cells

[1957] Total RNA was extracted from hybridoma cells using TRIzol™ Reagent (Invitrogen). The quantity and quality of the isolated RNA was analysed spectrophotometrically.

[1958] b) Antibody Variable Domain Recovery by RT-PCR

[1959] Selected clones were used to prepare total RNA, which was used in an RT-PCR reaction to recover the heavy and light chain V-regions. Murine IgG-specific reverse primers and human Ig-leader sequence-specific forward primer sets were used for the heavy chains. Murine kappa constant region specific reverse primers and human kappa-leader sequence specific forward primer sets were used for the kappa light chains. The RT-PCR products were separated by agarose gel electrophoresis with the DNA of the predicted size being gel purified and sequenced in the forward and reverse directions. Alternatively, the RT-PCR products were subcloned into a cloning vector and DNA of individual colonies submitted for sequencing.

### Example 4—Selection of Final Lead Panel

[1960] Recombinantly expressed antibodies were analysed by SPR to confirm binding to cynomolgus monkey PD-L1, as well as human PD-L1. Antibodies were also tested in a dendritic cell-T-cell mixed lymphocyte reaction (MLR) for ability to enhance IFNγ production (FIG. 1). Antibodies with consistent immune-stimulatory effects in the MLR, and binding to both human and cynomolgus PD-L1 were selected as the final lead panel—these were designated as clone 84G09 and clone 1D05. Data in FIG. 1 is from a single experiment. A further five experiments were conducted and showed similar results (84G09 showed activity in 3 out of 5 experiments, 1D05 showed activity in 3 out of 4 experiments, 1A01 showed activity is 1 out of 3 experiments and 8609 showed activity in 0 out of 3 experiments). One further experiment failed (including positive control).

[1961] Materials and Methods

[1962] a) Surface Plasmon Resonance for Analysis of Antibodies with Human Constant Region

[1963] Label-free surface plasmon resonance (SPR) analysis was carried out on the ProteOn XPR36 (BioRad) array SPR machine. An anti-human IgG capture surface was created on a GLC biosensor chip using a combination of anti-human Fc antibodies (Jackson Labs 09-005-008, 109-006-008 and 309-006-008) by amine coupling. Test antibodies were captured on this surface and human PD-L1-his and cynomolgus monkey PD-L1-FLAG (in-house, Seq ID No: 5) was used as the analyte at 128 nM, 32 nM, 8 nM, 2 nM, 0.5 nM and 0 nM. The data was analysed using the 1:1 model inherent to the ProteOn XPR36 analysis software.

[1964] b) Dendritic Cell—T-Cell MLR (Mixed Lymphocyte Reaction)

[1965] Dendritic cells were generated from monocytic precursors. Monocytic precursors were isolated from peripheral blood mononuclear cells (PBMCs) isolated using Ficoll-Paque plus (GE Healthcare) density gradient centrifugation from leukoreduction system chambers (NHSBT). Monocytes were isolated from PBMCs using negative selection magnetic separation beads (Miltenyi Biotec). Monocytes were plated in 96-well, flat-bottom TC plates at 5×10⁴/well and 1×10⁴/well and cultured with cytokines GM-CSF and IL-4 (both Peprotech) at 100 ng/mL for 7 days in culture media (Advanced RPMI (Gibco) supplemented with 10% v/v FBS and 2 nM glutamine (culture medium).

[1966] After 7 days, T-cells were purified from allogeneic PBMC using negative selection magnetic separation beads (Miltenyi). After purification, the isolation buffer was removed by centrifugation and aspiration. The cells were resuspended at 1×10⁶ cells/mL in culture medium, and 100 μL of T-cells were added to all wells with the exception of the DC-only wells. An additional 100 μL of culture medium was added to the DC-only and T-cell-only wells. Serial three-fold dilutions of antibodies were prepared in culture medium (top concentration 60 nM final). 10 μL of each dilution was added to cells.

[1967] The cells were incubated for five days at 37° C. After this period IFN-γ was measured by Duoset ELISA (R&D Systems) according to manufacturer's instructions.

### Example 5—in Depth Characterisation of Lead Antibodies

[1968] Lead antibodies 84G09 and 1D05 were subjected to in-depth characterisation, including SPR at 37° C., full titrations of antibodies in neutralisation assays, and confirmation of binding to PD-L1 but not PD-L2. Antibodies were also expressed with a human IgG4(PE) constant region (Seq ID No:199) for analysis by mixed lymphocyte reaction. Lead antibodies retain sub-nanomolar affinity at 37° C., and show potent neutralisation of PD-L1 binding to both PD-1 and CD80. Antibodies do not cross-react with PD-L2, bind natively expressed PD-L1 on dendritic cells, and are potent stimulators of IFNγ production in an MLR.

[1969] a) Human PD-L1/PD-1 Neutralisation Assay (ELISA)

[1970] PD-1 Fc (in house, Seq ID No:6) diluted to 1 μg/mL was adsorbed to 96-well, low auto-fluorescent, high protein binding plates (Costar) overnight at 4° C. Excess protein was removed by washing with PBS-Tween (0.1% v/v) and the wells were blocked with 1% w/v bovine serum albumin (BSA, Sigma) in PBS for 1 hour at room temperature, after which plates were washed as described previously. 30 μL titration (1/3 dilution) of antibody was added to a 96-well non-binding plate diluted in ELISA assay buffer (PBS+0.1% BSA). 30 μL biotinylated PD-L1 his (in-house, Seq ID No:3) at 50 nM working concentration (25 nM final assay concentration [FAC]) was added to the plate excluding control wells where 30 μL ELISA assay buffer was added. The plate was incubated for 30 minutes before transferring 50 μL to the coated plates. The coated plates were incubated for 1 hour at room temperature. Excess protein was removed by washing with PBS-Tween (0.1% v/v). PD-L1 binding was detected using streptavidin labelled Europium (Perkin Elmer) diluted 1/1000 in DELFIA assay buffer (Perkin Elmer). Plates were washed with TBS (Tris buffered saline)-Tween (0.1% v/v) and 50 μL/well of DELFIA Enhancement solution (Perkin Elmer) was added to the plate. Time-resolved fluorescence was measured at 615 nm on an Envision plate reader (PerkinElmer). Percentage of specific binding was calculated using Equation 3. IC₅₀ values were determined using GraphPad Prism software by curve fitting using a four-parameter logistic equation (Equation 4). Results are shown in FIG. 2 and summarised in Table 2.

$$Percentage of receptor binding ( ELISA )$$

$$Based on Fluorescence at 615 nm$$

$$\begin{matrix}\% of specific binding = \frac{sample value - non \text{-} specific binding}{total binding - non \text{-} specific binding} \times 100 \\ Total binding = biotinylated PD \text{-} L 1 ( no antibody ) \\ Non \text{-} specific binding = no biotinylated PD \text{-} L 1 & Equation 3 \\ Y = Bottom + ( Top - Bottom ) \text{/} ( 1 + 10 \hat{} ( ( Log IC 50 - X ) * HillSlope ) ) \\ X = logarithm of concentration . \\ Y = specific binding ( Equation 3 ) \\ Top and Bottom = Plateaus in same units as Y ( specific binding ) \\ Log {IC}_{50} in same units as X . Y starts at Bottom and goes to Top with a sigmoid shape . Specific binding decreases as X increases . & Equation 4\end{matrix}$$

[1971] c) CHO Human PD-L1/PD-1 or CD80 Neutralisation Assay (Flow Cytometry)

[1972] CHO-S cells untransfected (referred to as WT) or transfected with hPD-L1 were diluted in FACS buffer and were distributed to a 96-well V-bottom plate (Greiner) at a density of 1×10⁵ cells per well in 50 μL. Biotinylated human PD-1-Fc (in-house expressed, Seq ID No:6) or CD80-Fc (R&D Systems) were prepared as a titration from 1 μM final assay concentration (FAC), 1/2 dilution series in FACS buffer. Antibody titrations were prepared from 300 nM working concentration, 150 nM FAC, as a 1/3 dilution series in FACS buffer. Biotinylated PD-1 or CD80 were diluted in FACS buffer to 60 nM working concentration, 30 nM FAC. Plates were centrifuged at 300×g for 3 minutes to supernatant aspirated. 25 μL ligand and 25 μL antibody solution (or 50 μL of ligand titration) were added to cells and incubated at 4° C. for 1 hour. Cells were washed with 150 μL of PBS and centrifuged at 300 g for 3 minutes. Supernatant was aspirated and 150 μL PBS added. This wash step was repeated. Presence of bound CD80 or PD-1 was detected by addition of 50 μL of streptavidin-AlexaFluor 647 (Jackson ImmunoResearch) diluted 1/500 in FACS buffer. Cells were incubated 30 minutes at 4° C. in the dark. Cells were washed as described above. To fix cells, 100 μL 2% v/v paraformaldehyde was added and cells incubated for 30 minutes at 4° C., cells were pelleted by centrifugation at 300×g and the plates resuspended in 100 μL FACS buffer. AlexaFluor 647 signal intensity (geometric mean) was measured by flow cytometry using a BD FACS Array instrument. Results are shown in FIGS. 3 and 4 and summarised in Table 2.

$$Percentage of receptor binding ( flow cytometry )$$

$$Based on geometric mean fluorescence$$

$$\% of specific binding = \frac{sample value - non \text{-} specific binding}{total binding - non \text{-} specific binding} \times 100 \\ Total binding = biotinylated PD \text{-} 1 or CD 80 only ( no antibody ) \\ Non \text{-} specific binding = no ligand streptavidin AlexaFluor 647 only \qquad Equation 5$$

TABLE 2
Summary of lead antibody binding and neutralisation of PD-L1 binding to PD-1 or CD80

| | | | | | Receptor Neutralisation (mean of n = 3) | | |
|---|---|---|---|---|---|---|---|
| | | | | | PD-L1/PD-1 | PD-L1/CD80 | PD-L1/PD-1 |
| | | | | | neutralisation | neutralisation | neutralisation |
| | Human PD-L1 | | Cyno PD-L1 | | (FACS) | (FACS) | (ELISA) |
| Clone ID | (nM at 37° C.) | | (nM at 37° C.) | | IC₅₀ (nM) | IC₅₀ (nM) | IC₅₀ (nM) |
| 1D05 | 0.42 | | 0.43 | | 2.21 | 1.18 | 5.21 |
| | Kₒₙ = 1.85 | μM | Kₒₙ = 1.89 | μM | | | |
| | K_{off} = 0.779 | mM | K_{off} = 0.813 | mM | | | |
| 84G09 | 0.43 | | 0.52 | | 1.82 | 1.60 | 7.90 |
| | Kₒₙ = 2.43 | μM | Kₒₙ = 2.61 | μM | | | |
| | K_{off} = 1.05 | mM | K_{off} = 1.35 | mM | | | |

| | | | | | |
|---|---|---|---|---|---|
| Benchmark | 0.25 | 4.79 | 1.85 | 1.42 | 14.1 |

[1973] d) PD-L1/PD-L2 Binding

[1974] PD-L1-Fc (R&D Systems) and PD-L2-Fc (R&D Systems) were diluted to 2 μg/mL and separately adsorbed to 96-well, high protein binding plates (Greiner) overnight at 4° C., 50 μL/well. Excess protein was removed by washing with PBS-Tween (0.1% v/v) and the wells were blocked with 250 μL/well

[1975] Pierce Protein Free Blocking Buffer (Thermo, 37572) for 1 hour, after which plates were washed as described previously. Biotinylated anti-PD-L1 antibodies (in-house) or anti-PD-L2 control antibody (R&D Systems) were diluted in blocking buffer and three-fold serial dilutions performed from 10 μg/mL. 100 μL each antibody dilution was added to the plates in duplicate and incubated for 1 hour at room temperature, before washing as stated above. Antibody binding was detected using streptavidin labelled Europium (Perkin Elmer) diluted 1/1000 in DELFIA Assay buffer (Perkin Elmer). Plates were washed with TBS (Tris buffered saline)-Tween (0.1% v/v) and 50 μL/well of DELFIA Enhancement solution (Perkin Elmer) was added to the plate. Time-resolved fluorescence was measured at 615 nm on an Envision plate reader (PerkinElmer). Results are shown in FIG. 5.

[1976] e) SPR Analysis

[1977] Label-free surface plasmon resonance (SPR) analysis was performed as per Example 4, except the assay was performed at 37° C. Additionally, due to artefacts of running the assay at 37° C., the best referencing of the binding sensorgrams was found to be using a sensorgrams from a negative control antibody using the same concentrations of human PD-L1. Results are shown in Table 2.

[1978] f) Mixed Lymphocyte Reaction

[1979] Expanded CD4⁺ T-cells were thawed and rested in AIM V© medium (Gibco) at 37° C., 5% CO₂ overnight prior to the assay day. Serial dilutions of anti-human PD-L1 mAbs were prepared in the AIM medium at 4× final concentration. 50 μL of diluted mAbs was added to 96-well, U-bottom plates. 1×10⁴ immature dendritic cells (iDC) in 50 μL AIM medium and 1×10⁵ expanded CD4⁺ T-cells (expanded using Dynabeads Human T-Activator CD3/CD28 by Life Technologies (Invitrogen/Applied Biosystems; Cat No: 11131D), according to manufacturer's instructions) in 100 μL AIM medium were added to the antibody dilutions in each well. Control wells include: CD4⁺ T-cells alone, iDC alone, CD4⁺ T-cell and iDC with or without IgG isotype control antibodies in 200 μL AIM medium. Reaction plates were incubated for 5 days in a humidified incubator (37° C. in 5% CO₂). At the end of the assay, the plate was spun down (528×g for 3 minutes) and 100 μL of supernatant was collected from the wells by gentle pipetting. Supernatants were analysed using human IFNγ Quantikine ELISA kit (R&D Systems) according to manufacturer's instructions. Results are shown in FIG. 6.

[1980] g) Sequencing and Characterisation of Gene Segment Usage of 1D05 and 84G09

[1981] Antibodies were sequenced by Source Bioscience, and V-genes were compared to germline sequences.

TABLE 3
V region usage of lead antibodies

| | | | | | non- | | | | Non- |
|---|---|---|---|---|---|---|---|---|---|
| Antibody | V | D | J | CDRH3 | germline | | | CDRL3 | germline |
| clone ID | gene | gene | gene | length (aa) | CDRH3 (aa) | V gene | J gene | length (aa) | CDRL3 (aa) |
| 1D05 | IGHV3- | IGHD3- | IGHJ5 | 16 | 6 | IGKV1D- | IGKJ5*1 | 9 | 0 |
| | 9*01 | 10*01 | *02 | | | 39*01 | | | |
| 84G09 | IGHV3- | IGHD3- | IGHJ5 | 15 | 4 | IGKV1D- | IGKJ5*1 | 9 | 1 |
| | 9*01 | 10*01 | *02 | | | 39*01 | | | |

[1982] h) Binding of Lead Antibodies to Natively Expressed PD-L1

[1983] 84G09 and 1D05 were labelled with AlexaFluor647 and used to stain dendritic cells derived from monocytic precursors. This shows that lead antibodies bind PD-L1 that is natively expressed on human dendritic cells. Data is shown in FIG. 7.

[1984] Materials and Methods

[1985] PBMC were suspended in RPMI 1640 medium without additives and allowed to adhere to a tissue culture flask for two hours at 37° C. Non-adherent cells were removed and the flask washed three times with PBS. PBS was removed and replaced with RPMI 10% hiFBS (Gibco) containing 100 ng/mL GM-CSF and IL-4 (both Peprotech). Cells were cultured at 37° C. for 7 days, and then removed from flask using a cell scraper.

[1986] Cells were resuspended in FACS buffer (PBS 1% w/v BSA 0.1% w/v sodium azide) and plated at 10⁵ cells/well, and incubated with Trustain FcX (Biolegend) for 10 min to prevent antibody binding to FcγR. AlexaFluor647 labelled antibodies were added at a final concentration of 5 μg/mL and incubated at 4° C. for 1 hour. Cells were then washed three times in FACS buffer and fixed for 20 min in 4% paraformaldehyde (Affymetrix). After fixation, cells were washed three times as before and resuspended in FACS buffer for analysis by flow cytometry. Data was acquired using the MACSQuant flow cytometer (Miltenyi Biotec) and analysed in Flowio v10.

### Example 6—Antigen Preparation, Immunization Procedures, and Antigen-Specific B Cell Sorting and V-Region Recovery

[1987] Additional anti-human PD-L1 monoclonal antibodies were generated using the KyMouse™ system previously described. Genetically engineered HK mice were immunized with soluble recombinant human and mouse PD-L1 or surface expressed human and mouse PD-L1 displayed on mouse embryonic fibroblast (MEF) cells. Serum titres were performed by reverse ELISA and mice with the highest titres were selected for processing. At the end of each regime, spleen and lymph nodes were removed. Tissues were prepared into a single cell suspension and stained for sorting antigen-specific B-cells by FACS.

[1988] Materials and Methods

[1989] a) Immunisation of Mice

[1990] Mice were immunised with soluble recombinant human PD-L1 or a combination of human and mouse PD-L1 protein (in-house) as per the schedule described in Example 1 for KM032 (hereafter described as KM121). Mice were also immunised with human PD-L1 protein, and MEF cells expressing human or mouse PD-L1, as per the schedule described in Example 1 for KM033 (hereafter described as KM122). MEF cells expressing mouse PD-L1 were generated as per Example 1, but substituting mouse PD-L1 sequences for the human PD-L1 sequences, and substituting anti-mouse PD-L1 detection antibody (eBioscience) for the anti-human PD-L1 detection antibody.

[1991] b) Determining Serum Titre by Reverse PD-L1 ELISA Protocol

[1992] Titres in mouse serum samples were determined using a reverse PD-L1 ELISA protocol as per Example 1, with the following changes. In-house generated hPD-L1-his was labelled in-house using Lightning Link kit (Innova Biosciences), and used at 1 μg/mL in reagent diluent; 50 μL/well). Bound hPD-L1 was detected by addition of streptavidin-Europium (Perkin Elmer) diluted 1/1000 in DELFIA assay buffer (Perkin Elmer). Following incubation for 1 hour at room temperature in the dark, plates were washed using TBS (Tris buffered saline)-Tween (0.1% v/v) and 50 μL/well of DELFIA Enhancement solution (Perkin Elmer) was added to the plate. Time-resolved fluorescence was measured at 615 nm on an Envision plate reader (PerkinElmer). Fluorescence data was plotted as Europium counts.

[1993] c) Sorting of Antigen-Specific B Cells and Retrieval of V-Regions

[1994] The methods used were substantially as described in Example 1 of PCT application WO2015/040401, which is incorporated herein by reference. In brief, splenocytes and lymph node cells isolated from KM121 and KM122 immunisation regimes were stained with an antibody cocktail containing markers for the selection of cells of interest (CD19), whereas unwanted cells were excluded from the final sorted population (IgM, IgD, 7AAD). CD19⁺ B-cells were further labelled with human PD-L1 (Seq ID No:1) and mouse PD-L1 (Seq ID No:325, labelled with AlexaFluor647 and AlexaFluor488, respectively, in-house using Lightning Link kits) to detect B-cells producing specific antibodies—cells binding human PD-L1, or both human and mouse PD-L1 were selected. These cells were single cell sorted by FACS into lysis buffer. V-region sequences were recovered using RT-PCR and two further rounds of PCR, then bridged to mouse IgG1 constant region and expressed in HEK293 cells. Supernatants from HEK293 cells were screened for the presence of PD-L1 binding antibodies. This method is hereafter referred to as BCT.

### Example 7—Supernatant Screening

[1995] BCT supernatants were screened by HTRF, and selected primary hits further screened for binding to cell-expressed recombinant hPD-L1 and neutralisation of PD-1 binding, and for affinity of binding to human, cynomolgus and mouse PD-L1 recombinant protein by SPR, as described in this Example. KM121 antibodies with an affinity of 1 nM or better for human and in some cases also cynomolgus PD-L1 were taken forward for further characterisation. For KM122, antibodies with the capacity to neutralise PD-1 binding to cell-expressed PD-L1 were taken forward, along with high affinity (<1 nM) binding to both human and cynomolgus PD-L1. Antibodies did not bind to mouse PD-L1.

[1996] a) Primary Screen—Binding to Recombinant Human PD-L1 (BCT Supernatants)

[1997] Supernatants collected from BCT expression were screened for the ability of secreted antibodies to bind to hPD-L1 expressed as a recombinant protein (produced in-house). Binding of secreted antibodies to recombinant human and mouse PD-L1 were identified by HTRF® (Homogeneous Time-Resolved Fluorescence, Cisbio) assay format using FluoProbes®647H (Innova Biosciences) labelled PD-L1 (referred to herein as 647 hPD-L1 or 647 mPD-L1 for human PD-L1 and mouse PD-L1 labelled with FluoProbes®647H respectively). 5 μL BCT supernatant was transferred to a white 384-well, low-volume, non-binding surface polystyrene plate (Greiner). 5 μL of 25 nM 647 hPD-L1 or 647 mPD-L1 diluted in HTRF assay buffer was added to all wells. Reference antibody was diluted in BCT media (Gibco # A14351-01) to 40 nM and 5 μL added to plate. For negative control wells, 5 μL of mouse IgG1 (Sigma M9269 in some instances referred to as CM7) diluted to 40 nM in BCT media was added. Binding of secreted antibodies to PD-L1 was detected by addition of 10 μL of goat anti-mouse IgG (Southern Biotech) directly labelled with Europium cryptate (Cisbio) diluted 1/2000 in HTRF assay buffer. The plate was left to incubate in the dark for 2 hours prior to reading time resolved fluorescence at 620 nm and 665 nm emission wavelengths using an EnVision plate reader (Perkin Elmer).

[1998] Data were analysed by calculating 665/620 ratio and percent effect for each sample according to Equation 2 and Equation 1 respectively.

[1999] For KM121, primary hits were selected based on greater than or equal to 30 percent effect whereas for KM122 primary hits were selected based on greater than or equal to 40 percent effect.

[2000] Progression to secondary screen was based on data from recombinant PD-L1 binding.

[2001] b) Secondary Screen—Binding to Cell Expressed hPD-L1 and Neutralisation of hPD-L1 Binding to PD-1 (BCT Supernatants)

[2002] Binding of BCT supernatants were tested for ability to bind to CHO-S cells expressing hPD-L1. CHO-S cells expressing hPD-L1 (generated in-house), were diluted in FACS buffer (PBS 1% BSA 0.1% sodium azide) and were distributed to a 96-well, V-bottom plate (Greiner) at a density of 0.5-1×10⁵ cells per well. Cells were washed with 150 μL PBS and centrifuged at 300 g for 3 minutes. Supernatant was aspirated and 150 μL PBS added. This wash step was repeated.

[2003] 25 μL BCT neat supernatant, reference antibody or control antibody diluted to 300 nM in BCT media was added to the washed cells. 25 μL of 30 nM biotinylated human PD-1 (in-house) was added and cells were incubated at 4° C. for 60 minutes. 150 μL FACS buffer was added and cells washed as described above. To detect biotinylated PD-1 and anti-PD-L1 antibody binding, Streptavidin-647 (Jackson ImmunoResearch) and anti-Mouse PE (Jackson ImmunoResearch) were each diluted 1/500 in FACS buffer and 50 μL of this mixture added to cells. Cells were incubated 4° C. for 60 minutes. Cells were washed twice with 150 μL FACS buffer, centrifuging at 300 g for 3 minutes after each wash step and aspirating supernatant. Cells were fixed by addition of 50 μL 4% paraformaldehyde overnight. Cells were washed once as above and resuspended in FACS buffer for analysis. PE and APC signal intensity (geometric mean) was measured by flow cytometry using a BD FACS Array instrument. Data was plotted as geometric mean values without further calculation.

[2004] For KM121, secondary hits were selected based on high affinity (<1 nM) binding to human PD-L1. For KM122, secondary hits were selected based on comparable high affinity (<1 nM) binding human and cynomolgus PD-L1 and ability to neutralise PD-1 binding to cell-expressed PD-L1. Results are summarised in Table 4.

TABLE 4
Summary of BCT clone screening

| | Number of | Number of | Number of |
|---|---|---|---|
| | BCT | Primary hits | secondary |
| Experiment | supernatants | cherry | hits |
| ID | screened | picked | confirmed |
| KM121 | 984 | 162 | 7* |
| KM122 | 1312 | 263 | 45** |

*three of these secondary hits were not included in the primary screen and were screened by SPR and neutralisation only
**one hit was identified by primary screen but insufficient material was available for secondary screen. After re-expression, clone was shown to bind human and cynomolgus PD-L1 with affinity of <1 nM and carried forward

[2005] c) Analysis of Binding by Surface Plasmon Resonance

[2006] SPR analysis was carried out on the ProteOn XPR36 Array system. Anti-mouse IgG (GE Healthcare BR-1008-38) was immobilised on a GLM chip by primary amine coupling. Antibodies were directly captured from BCT supernatants. Human, mouse and cynomolgus PD-L1 were used as analytes and passed over the captured antibodies at a single concentration. The binding sensorgrams are double referenced with a 0 nM (ie buffer alone) injection, and the data is analysed using the 1:1 model inherent to the ProteOn analysis software. The assay is carried out at 25° C. and used HBS-EP as running buffer.

### Example 8—Characterisation of Selected Antibodies

[2007] Selected hits were re-expressed with a human IgG1 constant region and sent for sequencing at Source Bioscience. V region usage is listed in Table 5. Hits were then analysed in an ELISA to determine their ability to neutralise PD-L1/PD-1 interactions, and PD-L1/CD80 interactions. All seven KM121 hits neutralised PD-L1/CD80 interactions; however, four antibodies did not neutralise PD-L1/PD-1. Four out of five KM122 hits neutralised both PD-L1/PD-1 and PD-L1/CD80 internations. Results are shown in FIGS. 8 and 9. Antibodies shown to neutralise both PD-1 and CD80 interactions with PD-L1 were further screened for their ability to increase IFN-γ in an autologous monocyte-T-cell co-culture assay.

[2008] Materials and Methods

[2009] a) PD-L1/PD-1 and PD-L1/CD80 Neutralisation ELISA

[2010] CD80 (R&D Systems) or PD-1 (in-house) diluted to 2.5 μg/mL were adsorbed to 96-well, low auto-fluorescent, high protein binding plates (Costar) overnight at 4° C. Excess protein was removed by washing with PBS-Tween (0.1% v/v) and the wells were blocked with 1% w/v bovine serum albumin (BSA, Sigma) in PBS for 1 hour at room temperature, after which plates were washed with PBS-Tween as above. 60 μL of a titration (three-fold serial dilution) of antibody was added to a 96-well, non-binding plate diluted in ELISA assay buffer (PBS+0.1% BSA). 60 μL of biotin labelled PD-L1 at 16 nM working concentration (8 nM FAC) was added to the plate excluding control wells where 60 μL ELISA assay buffer was added. The plate was incubated for 30 minutes before transferring 50 μL to the coated plates. The coated plates were incubated for 1 hour at room temperature. Excess protein was removed by washing with PBS-Tween (0.1% v/v). PD-L1 binding was detected using streptavidin labelled europium (Perkin Elmer) diluted 1/1000 in DELFIA assay buffer (Perkin Elmer). The plates were washed with TBS (Tris buffered saline)-Tween (0.1% v/v) and 50 μL/well of DELFIA Enhancement solution (Perkin Elmer) was added to the plate. Time-resolved fluorescence was measured at 615 nm on an Envision plate reader (PerkinElmer). Percentage specific binding was calculated as defined in Equation 3. IC₅₀ values were determined using GraphPad Prism software by curve fitting using a four-parameter logistic equation (Equation 4). Results are shown in Table 4a below. Values for KM121 antibodies are a mean of three independent experiments. Values for KM122 are from a single experiment. ND indicates IC₅₀ value not determined, as a complete curve could not be generated.

TABLE 4a
IC₅₀ values for neutralisation of PD-
L1 interactions with PD-1 and CD80

| | Antibody | PD-1/PD-L1 | CD80/PD-L1 |
|---|---|---|---|
| Regime | clone ID | IC₅₀ (nM) | IC₅₀ (nM) |
| KM121 | 411B08 | 2.22 | 1.60 |
| KM121 | 411C04 | 2.45 | 1.93 |
| KM121 | 411D07 | ND | 9.06 |
| KM121 | 385F01 | 2.25 | 1.76 |
| KM121 | 386H03 | ND | 0.74 |
| KM121 | 389A03 | ND | 13.18 |
| KM122 | 416E01 | 1.72 | 0.98 |
| KM122 | 413G05 | 2.02 | 1.10 |
| KM122 | 414B06 | 1.84 | 1.00 |
| KM122 | 413F09 | ND | ND |
| KM122 | 413D08 | 1.20 | 0.67 |

[2011] Selected lead antibodies active in the monocyte-T-cell co-culture assay (see Example 9) were analysed by SPR at 25 and 37° C. Lead antibodies retained sub-nanomolar affinity binding to PD-L1 even at 37° C. Antibodies did not bind mouse PD-L1. Results are shown in Table 4b.

[2012] Materials and Methods

[2013] SPR analysis was performed as per Example 4 with the following amendments: analysis was performed at 37° C. as well as 25° C. to increase the stringency of the assay. Human, cynomolgus and mouse PD-L1 (his-tagged) were generated in house (Seq ID Nos 3, 5 and 326, respectively).

TABLE 4b
Binding affinities of selected lead antibodies

| Clone ID | Temperature | Antigen | KD (nM) |
|---|---|---|---|
| 413G05 | 25° C. | Human | 0.024 |

| | |
|---|---|
| Kon = 2.57 | μM |
| Koff = 62.3 | μM |

| | | | |
|---|---|---|---|
| 414B06 | 25° C. | Human | 0.172 |

| | |
|---|---|
| Kon = 4.09 | μM |
| Koff = 0.702 | mM |

| | | | |
|---|---|---|---|
| 416E01 | 25° C. | Human | 0.193 |

| | |
|---|---|
| Kon = 2.34 | μM |
| Koff = 45.1 | mM |

| | | | |
|---|---|---|---|
| 413G05 | 25° C. | Cyno | 0.015 |

| | |
|---|---|
| Kon = 2.66 | μM |
| Koff = 38.9 | mM |

| | | | |
|---|---|---|---|
| 414B06 | 25° C. | Cyno | 0.192 |

| | |
|---|---|
| Kon = 3.78 | μM |
| Koff = 0.726 | mM |

| | | | |
|---|---|---|---|
| 416E01 | 25° C. | Cyno | 0.411 |

| | |
|---|---|
| Kon = 2.44 | μM |
| Koff = 1.0 | mM |

| | | | |
|---|---|---|---|
| 413G05 | 37° C. | Human | 0.050 |

| | |
|---|---|
| Kon = 4.67 | μM |
| Koff = 0.235 | mM |

| | | | |
|---|---|---|---|
| 414B06 | 37° C. | Human | 0.778 |

| | |
|---|---|
| Kon = 5.88 | μM |
| Koff = 4.57 | mM |

| | | | |
|---|---|---|---|
| 416E01 | 37° C. | Human | 0.511 |

| | |
|---|---|
| Kon = 4.34 | μM |
| Koff = 2.22 | mM |

| | | | |
|---|---|---|---|
| 413G05 | 37° C. | Cyno | 0.046 |

| | |
|---|---|
| Kon = 4.31 | μM |
| Koff = 0.197 | mM |

| | | | |
|---|---|---|---|
| 414B06 | 37° C. | Cyno | 0.794 |

| | |
|---|---|
| Kon = 5.02 | μM |
| Koff = 3.98 | mM |

| | | | |
|---|---|---|---|
| 416E01 | 37° C. | Cyno | 0.998 |

| | |
|---|---|
| Kon = 4.03 | μM |
| Koff = 4.02 | mM |

### Example 9—Testing of Lead Anti-PD-L1 Antibodies in an Autologous Co-Culture Assay

[2014] The effects of anti-PD-L1 antibodies on IFNγ production are analysed in a co-culture of purified peripheral blood monocytes and CD45RO⁺ memory T-cells from the same donor. In brief, monocytes are isolated by negative selection using magnetic separation beads (Miltenyi Biotec). CD45RO⁺ T-cells are isolated by a first round of negative selection for CD3⁺ T-cells, and one round of positive selection for CD45RO⁺ cells (Miltenyi Biotec). Cell subsets are co-cultured at a 1:1 ratio in RPMI 10% hiFBS in the presence of anti-CD3 (UCHT1, eBioscience) to provide TCR stimulation, and antibodies under investigation. Supernatants are taken after 4 days for analysis of IFNγ by MSD (Meso Scale Discovery).

[2015] The experiments were performed as described, except IFNγ production was measured with the R&D Systems™ Human IFNγ Duoset® ELISA, using DELFIA® Eu-N1 Streptavidin detection.

[2016] Response for IFNγ standard (pg/mL) was plotted versus relative fluorescence response at 615 nM. IFNγ concentration was interpolated from standard curve in pg/mL using a 4-parameter logistic fit as defined by Equation 4. Antibody-induced IFNγ is represented as fold induction compared to assay signal of wells showing background levels of response as defined in Equation 6. Each plot represents mean fold induction for individual donors with at least 2 different donors represented versus antibody concentration Log (M). Results are shown in FIGS. 22 and 37.

Fold induction=assay response (pg/mL)/background response (pg/mL) Equation 6

[2017] Background IFNγ response=IFNγ concentration (pg/mL) from wells containing monocyte—T-cell co-culture with anti-CD3 stimulation, without antibody.

[2018] All five antibodies, in human IgG1 format, induced a specific, dose-dependent increase in IFNγ production by T-cells after 4 days of co-culture with autologous monocytes and anti-CD3 (see FIGS. 22a and 22b). The two antibodies that induced the highest increase in cytokine production, 413G05 and 414B06, were selected for repeat characterisation by SPR (see Example 8). Antibody 416E01, in human IgG4(PE) format (Seq ID No:199), also induced specific dose-dependent increase in IFNγ production in the co-culture assay. This antibody was also selected for repeat SPR analysis.

[2019] The three selected antibodies were also analysed alongside the two lead antibodies selected in Example 4 (1D05 and 84G09), and a commercial effector enabled benchmark antibody. Antibodies were formatted as human IgG1. All antibodies induced dose-dependent IFNγ production in this assay (FIG. 37 and Table 22).

TABLE 5
V Gene usage for antibody leads

| | | | | | | Non- | | | | Non- |
|---|---|---|---|---|---|---|---|---|---|---|
| | Antibody | V | D | J | CDHR3 | germline | V | J | CDRL3 | germline |
| Regime | clone ID | gene | gene | gene | length (aa) | CDRH3 (aa) | gene | gene | length (aa) | CDRL3 (aa) |
| KM121 | 411B08 | IGHV3-7*01 | IGHD4-11*01 | IGHJ4*02 | 12 | 7 | IGKV1D-12*02 | IGKJ3*01 | 9 | 1 |
| KM121 | 411C04 | IGHV3-7*01 | IGHD4-11*01 | IGHJ4*02 | 12 | 6 | IGKV1D-12*02 | IGKJ3*01 | 9 | 1 |
| KM121 | 411D07 | IGHV4-4*02 | IGHD3-10*01 | IGHJ4*02 | 8 | 1 | IGKV4-1*01 | IGKJ2*04 | 8 | 2 |
| KM121 | 386H03 | IGHV4-4*02 | IGHD3-10*01 | IGHJ4*02 | 8 | 2 | IGKV4-1*01 | IGKJ2*04 | 8 | 1 |
| KM121 | 389A03 | IGHV4-39*01 | IGHD6-13*01 | IGHJ1*01 | 13 | 6 | IGKV4-1*01 | IGKJ1*01 | 9 | 1 |
| KM121 | 385F01 | IGHV3-7*01 | IGHD4-11*01 | IGHJ4*02 | 12 | 7 | IGKV1D-12*02 | IGKJ3*01 | 9 | 1 |
| KM122 | 413D08 | IGHV3-33*01 | IGHD5-18*01 | IGHJ6*02 | 11 | 3 | IGKV1-17*01 | IGKJ1*01 | 9 | 1 |
| KM122 | 413G05 | IGHV3-11*01 | IGHD1-20*01 | IGHJ6*02 | 16 | 5 | IGKV1D-12*02 | IGKJ4*01 | 9 | 1 |
| KM122 | 413F09 | IGHV3-23*04 | IGHD5-18*01 | IGHJ4*02 | 16 | 8 | IGKV1-9*d01 | IGKJ5*01 | 9 | 3 |
| KM122 | 414B06 | IGHV3-7*01 | IGHD5-24*01 | IGHJ4*02 | 12 | 6 | IGKV1D-12*02 | IGKJ3*01 | 9 | 0 |
| KM122 | 416E01 | IGHV3-23*04 | IGHD6-13*01 | IGHJ4*02 | 14 | 10 | IGKV1D-12*02 | IGKJ5*01 | 9 | 2 |

TABLE 22
Summary of data from monocyte-T cell co-culture experiments.

| Antibody | mean EC50 | mean fold increase |
|---|---|---|
| name | (nM) | IFNγ |
| 1D05 | 0.21 | 3.04 |
| 84G09 | 0.081 | 3.60 |
| 413G05 | 0.082 | 2.85 |
| 414B06 | 0.012 | 3.33 |
| 416E01 | 0.064 | 2.23 |
| benchmark 2 | 0.057 | 2.30 |

### Example 10—Bispecific FIT-Ig Molecules Targeting PD-L1 and TIGIT

[2020] Bispecific FIT-Ig constructs were constructed substantially as described in Example 1 of International Application WO2015/103072 (in the name of EpiMab Biotherapeutics, and is incorporated herein by reference).

[2021] The bispecific constructs, having a FIT-Ig structure, as described in FIG. 1 of WO2015/103072 were expressed in CHO cells with a vector ratio of: Construct 1 DNA: 50%, Construct 2: DNA 25%: Construct 3 DNA 25% of total DNA in the transient transfection. The bispecific molecules were purified by standard Protein A and size exclusion chromatography. In this regard, Construct 1 is the polypeptide chain made up of VL_{A}-CL-VH_{B}-CH1-CH2-CH3 in FIG. 1 of WO2015/103072. Construct 2 is the polypeptide chain made up of VH_{A}-CH1 in FIG. 1 of WO2015/103072, and Construct 3 is the polypeptide chain made up of VL_{B}-CL in FIG. 1 of WO2015/103072.

[2022] SPR analysis was used to determine affinities of the various arms of the bispecific and the parental monospecific antibodies were used to determine if the affinities had been altered in the bispecific molecule. Sequential binding of antigens were used to test whether the bispecific constructs were capable of binding on both arms of the bispecific.

TABLE 6
Bispecific antibody constructs and control monospecific antibodies

| | | Native variable | Additional |
|---|---|---|---|
| Full name | Alias | domain¹ | Domain² |
| 1D05/in-house anti-TIGIT (KY23) | Bispecific 1 | 1D05 (anti-PD-L1)* | Kymab TIGIT (KY23) |
| In-house anti-TIGIT (KY23)/1D05 | Bispecific 2 | Kymab TIGIT (KY23) | 1D05 (anti-PD-L1)* |
| Tool anti-TIGIT/Tool anti-PD-L1 | Bispecific 3 | Tool anti-TIGIT | Tool anti-PD-L1 |
| Tool anti-PD-L1/Tool anti-TIGIT | Bispecific 4 | Tool anti-PD-L1 | Tool anti-TIGIT |
| 1D05 | Antibody 1 | In-house anti-PD- | na |
| | | L1* | |
| Kymab TIGIT | Antibody 2 | In-house anti- | na |
| | | TIGIT | |
| Tool PD-L1 | Antibody 3 | Tool anti-PD-L1 | na |
| Tool TIGIT | Antibody 4 | Tool anti-TIGIT | na |

*1D05 has the V_{H} sequence of Seq ID No: 33 and the V_{L} sequence of Seq ID No: 43, and a heavy chain constant region of Seq ID No: 205
¹“Native Variable domain” corresponds to the antigen-binding site formed by VH_{B} and VL_{B} in FIG. 1 of WO2015/103072
²“Additional domain” corresponds to the antigen binding site formed by VHA and VLA in FIG. 1 of WO2015/103072Aa) Kinetic analysis

[2023] An anti-human IgG capture surface was created by a mix of 3 anti-human Fc antibodies (Jackson Labs 109-005-008, 109-006-008 and 309-006-008) immobilised on a GLC chip by primary amine coupling. Control monospecific antibodies or Bispecific antibody constructs were captured on this surface and human PD-L1 or TIGIT was used as analyte at 512 nM, 128 nM, 32 nM, 8 nM and 2 nM with 0 nM (i.e. buffer alone) used to double reference the binding sensorgrams. The assay was run at 25° C., using HBS-EP as running buffer. The sensorgrams were fitted to the 1:1 model inherent to the ProteOn analysis software.

TABLE 7
TIGIT Binding

| | | | | KD |
|---|---|---|---|---|
| Full name | Alias | Ka | Kd | (nM) |
| 1D05/in-house anti-TIGIT (KY23) | Bispecific 1 | 2.38E+06 | 2.65E−03 | 1.11 |
| In-house anti-TIGIT (KY23)/1D05 | Bispecific 2 | 1.12E+06 | 2.02E−03 | 1.8 |
| Tool anti-TIGIT/Tool | Bispecific 3 | 2.10E+06 | 3.69E−03 | 1.75 |
| anti-PD-L1 | | | | |
| Tool anti-PD-L1/Tool | Bispecific 4 | 3.22E+06 | 2.98E−03 | 0.93 |
| anti-TIGIT | | | | |
| 1D05 | Antibody 1 | nbs | nbs | nbs |
| Kymab TIGIT | Antibody 2 | 1.58E+06 | 2.27E−03 | 1.44 |
| Tool PD-L1 | Antibody 3 | nbs | nbs | nbs |
| Tool TIGIT | Antibody 4 | 3.16E+06 | 5.42E−03 | 1.72 |

TABLE 8
PD-L1 Binding

| | | | | KD |
|---|---|---|---|---|
| Full name | Alias | Ka | Kd | (nM) |
| lD05/in-house anti-TIGIT (KY23) | Bispecific 1 | 6.03E+05 | 1.61E−04 | 0.27 |
| In-house anti-TIGIT (KY23)/1D05 | Bispecific 2 | 1.04E+06 | 2.14E−04 | 0.21 |
| Tool anti-TIGIT/Tool | Bispecific 3 | 1.25E+06 | 1.22E−04 | 0.1 |
| anti-PD-L1 | | | | |
| Tool anti-PD-L1/Tool | Bispecific 4 | 7.36E+05 | 1.57E−04 | 0.21 |
| anti-TIGIT | | | | |
| 1D05 | Antibody 1 | 9.71E+05 | 3.36E−04 | 0.35 |
| Kymab TIGIT | Antibody 2 | nbs | nbs | nbs |
| Tool PD-L1 | Antibody 3 | 1.05E+06 | 2.08E−04 | 0.2 |
| Tool TIGIT | Antibody 4 | nbs | nbs | nbs |

[2024] b) Bispecific Binding

[2025] Using the same anti-human IgG capture surface created for kinetic analysis, the bispecific antibody constructs were captured on this surface and recombinant PD-L1 or TIGIT was used as analyte at 512 nM, 128 nM, 32 nM, 8 nM and 2 nM with 0 nM (i.e. buffer alone) used to double reference the binding sensorgrams. The assay was carried out by injecting PD-L1 followed by TIGIT with no regeneration between analyte injections, and also with TIGIT followed by PD-L1. The sensorgrams for the double referenced 512 nM are shown in FIGS. 10 and 11.

[2026] c) Characterisation of Bispecific FIT-Ig Molecules Binding to PD-L1 and TIGIT by AlphaScreen®

[2027] An AlphaScreen® binding assay was developed to assess the bispecific binding of PD-L1/TIGIT FIT-Ig molecules. The assay was set up using biotinylated His-PD-L1 (SEQ ID No:3) and His-FLAG-TIGIT (SEQ ID No:539) detected respectively with streptavidin donor beads and anti-FLAG acceptor beads (both Perkin Elmer, 6760613). Human IgG1 (Sigma 15154) and parental monospecific antibodies alone or in combination were used as negative controls, while an anti-His antibody (Qiagen 34660) was used as positive control.

[2028] Two protocols were created to investigate the ability of FIT-Ig molecules to promote proximity of TIGIT and PD-L1 coated beads with a distinct stringency. Antibodies were either incubated with PD-L1 and TIGIT proteins before adding the AlphaScreen® detection beads (Method one), or incubated with the detection beads pre-coated with their respective TIGIT and PD-L1 proteins (Method two). Method two was designed to mimic the cell recruitment by bispecific antibodies.

[2029] i) Method One

[2030] Bispecific antibodies, parental monospecific antibodies and control antibodies were prepared in buffer (PBS pH 7.4 (Gibco) and 0.1% w/v BSA (Sigma)) at 150 nM and diluted as per 1:3 series, 8 points. 5 μL of each serial dilution of antibody were mixed in a 384-well AlphaLISA® assay plate (Perkin Elmer 6005350) to 5 μL of biotinylated His-PD-L1 and 5 μL of His-FLAG-TIGIT at 50 nM in buffer. Parental monospecific antibodies were also prepared as described above starting from 300 nM to be tested in combination. 2.5 μL of the first antibody was added to the same volume of the second antibody, then 5 μL of each combination of parental monospecific antibodies were mixed in assay plates to 5 μL of biotinylated His-PD-L1 and 5 μL of His-FLAG-TIGIT at 50 nM in buffer. Assay plates were incubated for 1 hour at room temperature before adding 5 μL of anti-FLAG acceptor beads at 0.1 g/L for an additional hour at room temperature in the dark. Finally, 5 μL of streptavidin donor beads at 0.1 g/L were added to assay plates for 2 hours and 30 minutes. Assay plates were read using an EnVision plate reader (Perkin Elmer) with excitation/emission wavelengths of 680/615 nm. The fluorescent counts measured (Alpha signal) were plotted in Prism against antibody titrations. Results are shown in FIG. 25. Binding of FIT-Ig molecules to PD-L1 and TIGIT increases with the concentration of antibody up to 10 nM. No binding is observed for the monospecific parental antibodies and the isotype control.

[2031] ii) Method Two

[2032] Streptavidin donor beads prepared at 0.05 g/L in buffer (PBS pH 7.4 (Gibco 14190169) and 0.1% w/v BSA (Sigma)) were coated with biotinylated His-PD-L1 (Seq ID No:3) at 25 nM, while His-FLAG-TIGIT (Seq ID No:539) at 25 nM was used to label anti-FLAG acceptor beads at 0.05 g/L in buffer. Both acceptor and donor beads were incubated for 1 hour at room temperature in the dark.

[2033] Bispecific antibodies, parental monospecific antibodies, alone and combined, and control antibodies were prepared in buffer at 300 nM and diluted as per 1:3 series, 8 points. 5 μL of each serial dilution of antibody were mixed in a 384-well AlphaLISA® assay plate (Perkin Elmer 6005350) to 10 μL of pre-coated donor beads and 10 μL of pre-coated acceptor beads. Assay plates were incubated at room temperature for 4 hours in the dark and then read as described for method one. The fluorescent counts measured (Alpha signal) were plotted in Prism against antibody titrations. Results are shown in FIG. 26. Binding of FIT-Ig molecules to PD-L1 and TIGIT increases with the concentration of antibody up to 20 nM. No binding is observed for the monospecific parental antibodies and the isotype control.

[2034] d) Characterisation of Bispecific FIT-Ig Molecules Binding to PD-L1 and TIGIT by Flow Cytometry

[2035] A flow cytometry protocol was developed to assess the ability of the FIT-Ig molecules to promote the recruitment of cells expressing TIGIT and PD-L1. For this purpose, CHO cells transfected with human PD-L1 were stained with CellTrace™ Far Red (Invitrogen C34572) which emits maximally at 661 nm while HEK cells transfected with human TIGIT were stained with CellTracer™ Violet (Invitrogen C34571) which emits maximally at 450 nm.

[2036] CHO human PD-L1 and HEK human TIGIT cells were harvested, counted, washed, and re-suspended in PBS (Gibco 14190169) at 1 million of cells per mL. CellTrace™ Far Red and CellTrace™ Violet dyes were diluted 1:2000 and incubated with cells for 20 min at 37° C. in the dark, according to manufacturer's recommendations. Buffer (PBS (Gibco 14190169), 1% BSA (Sigma) 0.1% Na azide (Severn Biotech 40-2010-01)) was then added in excess for an additional 5-minute incubation step. Cells were spun down, re-suspended in buffer at 0.5 million of cells per mL and incubated for at least 10 minutes at 37° C. before proceeding with binding protocol. Unstained cells were kept and used to set up the gating strategy.

[2037] Bispecific antibodies and human IgG1 were prepared in buffer at 150 nM and diluted as per 1:3 series, 8 points. 50 μL of each serial dilution of antibody, 50 μL of CHO human PD-L1 cells labelled with CellTrace™ Far Red and 50 pt of HEK human TIGIT labelled with CellTrace—Violet were added to a 96-well, V-bottom PS plate (Greiner 651901). Assay plates were incubated at room temperature for 1 hour under gentle agitation (450 rpm) before being read using the Attune NxT flow cytometer (Thermo Fisher). CellTrace™ Violet was excited using the Violet laser and detected in the VL1 channel with a 440/50 bandpass filter. CellTrace™ Far Red was excited using the Red laser and detected in the RL1 channel with a 670/14 bandpass filter. Sample collection was performed without vortexing samples. FCS files were analysed with FlowJo® software. Single cells and duplets were gated based on the forward and side scatter dot plot.

[2038] Data analysis resulted in the identification of four different gates: a double negative quadrant corresponding to unstained CHO human PD-L1 and unstained HEK human TIGIT; two quadrants positive for single staining (in VL1 or RL1 channel); and a quadrant positive for dual staining (in both VL1 and RL1 channels) composed of stained CHO human PD-L1 and stained HEK human TIGIT recruited by FIT-Ig molecules. Percentages of double positive cells were plotted into Prism against antibody titrations. Results are shown in FIG. 27. Percentage of double positive cells increases with the concentration of FIT-Ig molecules up to 1 nM.

[2039] The monospecific binding of test molecules to target was confirmed on stained cells using monospecific antibodies labelled with R-Phycoerythrin (PE) which emits maximally at 590 nm. PE-labelled Antibody 1, Antibody 2 and human IgG1 were diluted in buffer at 150 nM. 50 μl of each antibody were mixed with 504 of stained CHO human PD-L1 and 50 μl of stained HEK human TIGIT in a 96-well, V-bottom PS plate (Greiner 651901). Following a 1 hour incubation at room temperature, cells were washed 3 times with 200 μL/well of PBS and re-suspended in 150 μL/well of buffer. Assay plates were read using the Attune NxT flow cytometer (Thermo Fisher) to record fluorescence. Cell Trace™ Violet and Far Red were detected as stated above. PE was excited using the Yellow laser and detected in the YL1 channel with a 585/16 bandpass filter. GeoMean values in the YL1 channel were used to determine monospecific binding to stained CHO human PD-L1 or stained HEK human TIGIT.

### Example 11—Generation and Expression of Anti-PD-L1-IL-2 Immunocytokine Constructs

[2040] Immunocytokines were generated by fusing wild type IL-2 (SEQ ID No:301), or IL-2 containing deletions in the first nine amino acids (see SEQ ID Nos:303 to 323, fused to Seq ID No:324), to the light chain of anti-PD-L1 antibody 1D05 (see Seq ID No:45). These were paired with an IgG1 effector-disabled variant of 1D05 heavy chain (Seq ID No:205). Wild type IL-2 fused to the heavy chain of 1D05 was generated for use as a control (SEQ ID No:302) and paired with the unmodified light chain of 1D05 (Seq ID No:45). Twenty-two immunocytokines were successfully expressed and characterised further. One light chain construct, 1D05 Di did not express successfully.

[2041] Materials and Methods

[2042] The DNA sequences encoding the anti-PD-L1 (antibody 1D05) immunocytokine (C-terminal IL-2 fusion to light chain) were purchased as synthetic DNA strings and cloned into the pTT5 expression vector using the Golden Gate cloning strategy. The heavy chain sequence of 1D05, includes a constant region which is a disabled IgG1 variant with changes from wild-type shown in bold (Seq ID No:299). The light chain of antibody 1D05 has full length wild type IL-2 sequence (underlined) fused to the C-terminus of the Kappa constant region (Seq ID No:300). Overlap PCR using appropriate oligonucleotide primers were used to generate variants of N-terminal of IL-2 (see Seq ID No:300 where IL-2 the sequence is underlined and the region to be varied is shown in bold). Variant sequences were cloned into the pTT5 expression vector using the Golden Gate method. The wild type and variant constructs were transfected to Expi293™ cells for expression.

### Example 12—Generation of IL-2R Transfectant Cells for Screening

[2043] In order to differentiate between immunocytokine activity on the high affinity (αβγ) and intermediate affinity (βγ) IL-2 receptors, IL-2R transfectants were generated. TF-1 cells, expressing endogenous common γ chain, were transfected with p, or a and 3 receptor subunits, to impart responsiveness to IL-2. The proliferative response to immunocytokines was then analysed using these cells (see Example 13).

[2044] Materials and Methods

[2045] Two recombinant cell lines were generated to distinguish between signalling through high affinity (αβγ) and intermediate affinity (βγ) IL-2R. The erythroleukemia cell line TF-1 (European Collection of Authenticated Cell Cultures) shows complete growth dependency on granulocyte-macrophage colony-stimulating factor (GM-CSF) or interleukin-3 (IL-3). The first cell line generated was transfected with full length human IL-2Rβ (CD122) only. The second cell line was generated by transfecting the full length human IL-2Rα (CD25) into the first cell line.

[2046] The transfected sequences were codon optimized for mammalian expression and cloned into an expression vector under the CMV promoter flanked by 3′ and 5′ piggyBac specific terminal repeat sequences facilitating stable integration into the cell genome (see: “A hyperactive piggyBac transposase for mammalian applications”; Yusa K., et al., Proc. Natl. Acad. Sci. USA., 108(4): 1531-6, 2011 Jan. 25). Furthermore, the expression vector for each subunit contained a different selection cassette to facilitate stable cell line generation. The β subunit was selected using puromycin (Sigma) and the a subunit using geneticin (Gibco). The a subunit was transfected into cells already expressing the β subunit.

[2047] The expression plasmids were co-transfected with a plasmid encoding piggyBac transposase into the TF1 cell line by electroporation using the Lonza 4-D nucleofector transfection X kit system according to manufacturer instructions. 24 hours after transfection, complete media was supplemented with the appropriate selection and cells grown for at least 3 weeks to select a stable line, with media being exchanged every 3 to 4 days. The expression of the recombinant human subunits was assessed by flow cytometry using anti-human CD122 (IL-2Rβ) APC conjugated antibody (eBioscience) and anti-human CD25 (IL-2Ra) PE conjugated antibody (eBioscience). Endogenous common γ chain expression was confirmed with anti-human CD132 (common γ chain) PE conjugated antibody (eBioscience). As expression was low, CD122⁺ cells were sorted by fluorescence activated cell sorting (FACS) and further cultured under selection. There was uniform expression of a chain after transfection, and therefore these cells were not sorted.

[2048] Complete TF1 media was made up of RPMI medium 1640 (Gibco) plus GM-CSF (2 ng/mL) and supplemented with 10% v/v heat inactivated fetal bovine serum (hiFBS, Gibco). Once responsiveness to IL-2 was confirmed, transfected cell lines were maintained in RPMI 1640, 10% hiFBS and 5 ng/mL recombinant human IL-2 with (αβ) or without (β) geneticin.

### Example 13—Assessing Ability of Immunocytokine Constructs to Signal Through IL-2R

[2049] Immunocytokines were assessed for their ability to induce proliferation of TF1 cell lines transfected with the β subunit, or with both the a and β subunits of IL-2R. Cells were starved of cytokines overnight, then stimulated with titrations of each immunocytokine. CellTiter-Glo® was used to determine the number of viable cells in culture after 3 days, based on quantitation of the ATP present. There was a broad range of activities of the immunocytokines on IL-2Rβγ, with the largest IL-2 deletions having the greatest reduction on proliferation, compared with equimolar amounts of free IL-2. The effect on αβγ activity is not as pronounced, but again the greatest reduction in proliferation is seen with the largest IL-2 deletions. Deletions in the first few N-terminal amino acids of IL-2 allow for fine tuning of cytokine activity. A representative experiment is shown in FIGS. 12(a) and (b).

[2050] Materials and Methods

[2051] IL-2R transfected TF1 cells were routinely cultured in RPMI+10% fetal bovine serum (culture medium) with the addition of IL-2 (Peprotech) at 5 ng/mL for the β transfected cell line and IL-2 at 5 ng/mL and Geneticin (Gibco) at 350 μg/mL for the αβ transfected cell line. Prior to testing of immunocytokine constructs, the cells were harvested by centrifugation and aspirated to remove the supernatant. The cells were washed in PBS to remove cytokines and antibiotics. Cells were resuspended in fresh culture medium at 10⁵ cells/mL, without supplements and returned to the incubator overnight.

[2052] The cells were harvested by centrifugation and aspirated to remove the supernatant. Cells were resuspended in complete medium and 30 μL of cell solution was added to the plate (white walled tissue culture treated 384-well plate) wells to achieve an initial cell concentration of 1250 cells/well.

[2053] The IL-2 ligand was prepared as serial four-fold dilutions from 300 ng/mL final assay concentration (FAC) (600 ng/mL working) in culture media. The immunocytokine constructs were titrated from 0.1 μg/mL (three-fold dilutions) for testing on the αβγ cell line and 10 μg/mL (three-fold dilutions) for the βγ cell line. 30 μL of titrations were added to the cell plate. To control wells, 30 μL of culture media without IL-2 was added. To reduce evaporation effects, the outermost rows/columns of the plate were filled with 80 μL of culture media. The plates were then incubated for 3 days at 37° C., 5% CO₂. Following the culture period proliferation of TF-1 cells was assessed by addition of 30 μL of Cell Titre Glo (Promega) to all wells. The plate was incubated at room temperature for 10 minutes then read using ultrasensitive luminescence filter.

$$Calculation of fold over background from TF \text{-} 1 proliferation assay$$

$$fold over background = \frac{sample RLU}{mean over background RLU} \\ RLU = relative luminescence units \\ Data expressed as fold over background . Background was defined as wells containing cells but no cytokine \qquad Equation 7$$

### Example 14—Binding of Immunocytokines to PD-L1

[2054] Surface plasmon resonance was used to confirm the ability of the immunocytokine constructs to bind PD-L1. The presence of the IL-2 on the light chain does not have any detrimental effect on binding (Table 9). Four constructs with a range of IL-2 activities were shortlisted for further characterisation—these were 1D05 D1-9 ICK, 1D05 D1-8 ICK, 1D05 D9-2 ICK and 1D05 D9-7 ICK.

TABLE 9
Affinity of 1D05 binding to PD-L1 is unaffected by the fusion
of IL-2 to the antibody, as measured by surface plasmon
resonance. Data shown is from a single experiment

| | KD |
|---|---|
| Sample Name | (nM) |
| 1D05 | 0.171 |
| 1D05 HC-IL2 | 0.240 |
| 1D05 LC-IL2 | 0.207 |
| 1D05 IC45 (D5-9) | 0.203 |
| 1D05 IC46 (D1-9) | 0.195 |
| 1D05 IC64 (D5-7) | 0.214 |
| 1D05 D1-2 | 0.187 |
| 1D05 D1-3 | 0.199 |
| 1D05 D1-4 | 0.186 |
| 1D05 D1-5 | 0.203 |
| 1D05 D1-6 | 0.211 |
| 1D05 D1-7 | 0.178 |
| 1D05 D1-8 | 0.190 |
| 1D05 D9 | 0.205 |
| 1D05 D9-8 | 0.225 |
| 1D05 D9-7 | 0.200 |
| 1D05 D9-6 | 0.211 |
| 1D05 D9-4 | 0.175 |
| 1D05 D9-3 | 0.171 |
| 1D05 D9-2 | 0.189 |
| 1D05 D2-6 | 0.201 |
| 1D05 D3-7 | 0.203 |
| 1D05 D4-8 | 0.208 |
| benchmark | 0.099 |

[2055] Materials and Methods

[2056] Analysis of Immunocytokines by Surface Plasmon Resonance

[2057] Label-free surface plasmon resonance (SPR) analysis was carried out on the ProteOn XPR36 (BioRad) array SPR machine. An anti-human IgG capture surface was created on a GLC biosensor chip using amine coupling of an anti-human IgG from GE Healthcare. Test antibodies were captured on this surface and human PD-L1 (in-house) was used as the analyte at 64 nM, 16 nM, 4 nM, 1 nM and 0.25 nM. The assay was carried out at 25° C. using HBS-EP (Teknova H8022). Buffer alone was used to reference the binding sensorgrams. The data was analysed using the 1:1 model inherent to the ProteOn XPR36 analysis software.

### Example 15—Assessing Capacity of Immunocytokines to Neutralise the Interaction of PD-L1 and PD-1/CD80

[2058] To ensure that fusion of the IL-2 molecule to the antibody did not disrupt its neutralisation capacity, shortlisted immunocytokines were tested in a neutralisation ELISA. The shortlisted immunocytokines tested did not differ from wild type antibody in their ability to neutralise interactions between PD-L1 and PD-1, and PD-L1 and CD80. Results are shown in FIG. 13 and Table 10. Values in the table are the means of three independent experiments.

TABLE 10
Summary of neutralisation ELISA data, expressed
as mean of three independent experiments

| | PD1-PD-L1 | CD80-PD-L1 |
|---|---|---|
| Clone | Neutralisation IC₅₀ (nM) | Neutralisation IC₅₀ (nM) |
| 1D05 | 1.41 | 0.882 |
| 1D05 LC-IL-2 | 0.833 | 0.505 |
| 1D05 IC46 (D1-9) | 1.75 | 1.07 |
| 1D05 D1-8 | 1.16 | 0.745 |
| 1D05 D9-2 | 1.55 | 0.947 |
| 1D05 D9-7 | 1.15 | 0.70 |
| Hybrid Control | N/A | N/A |

[2059] Materials and Methods

[2060] a) PD-L1/PD-1 or PD-L1/CD80 Neutralisation ELISA

[2061] CD80 (R&D Systems) or PD-1 (in house) diluted to 2.5 μg/mL were adsorbed to 96-well, low auto-fluorescent, high protein binding plates (Costar) overnight at 4° C. Excess protein was removed by washing with PBS-Tween (0.1% v/v) and the wells were blocked with 1% w/v bovine serum albumin (BSA, Sigma) in PBS for 1 hour at room temperature, after which plates were washed as described previously. 60 μL of a titration (three-fold dilutions from 100 nM) of antibody was added to a 96-well, non-binding plate diluted in ELISA assay buffer (PBS+0.1% BSA). 60 μL of biotinylated PD-L1 (in house, labelled with Lightning Link Biotinylation kit) at 16 nM working concentration (8 nM FAC) was added to the plate excluding control wells where 60 μL ELISA assay buffer was added. The plate was incubated for 30 min before transferring 50 μL to the coated plates.

[2062] The coated plates were incubated for 1 hour at room temperature. Excess protein was removed by washing with PBS-Tween (0.1% v/v). PD-L1 binding was detected using streptavidin labelled Europium (Perkin Elmer) diluted 1/1000 in DELFIA assay buffer (Perkin Elmer). The plates were washed with TBS (Tris buffered saline)-Tween (0.1% v/v) and 50 μL/well of DELFIA Enhancement solution (Perkin Elmer) was added to the plate. The time-resolved fluorescence was measured at 615 nm on an Envision plate reader (PerkinElmer). Percentage specific binding was calculated as defined in Equation 3.

[2063] IC₅₀ values were determined using GraphPad Prism software by curve fitting using a four-parameter logistic equation (Equation 4) from the percentage specific binding (Equation 3).

### Example 16—De-Immunisation of Anti-PD-L1 Antibody

[2064] To reduce the possibility of adverse immunological reactions based around the anti-PD-L1-immunocytokine, a series of 1D05 antibody mutants (Seq ID Nos:47 to 51) was created with anticipated lower potential of immunogenicity, as determined by T-cell epitope analysis software. The mutations can be single or in combination. Mutants were assessed for their ability to bind PD-L1 with the same affinity as the wild-type molecule by SPR as described in Example 14, with the addition of human PD-L1 analyte at 256 nM. Mutations under investigation are included as Seq ID Nos:47 to 51, indicated by underlined and bold text. The V_{H} framework mutations (Seq ID Nos:47 and 48) do not have any detrimental effects on binding. The V to A mutation in CDRH2 (Seq ID No:50) was detrimental to binding, and so an alternative mutation will be analysed (V to Y, Seq ID No:298). Results are shown in Table 11.

### Example 17—Inhibition of Tumour Growth by an Anti-PD-L1 Antibody in NOD/SCID: Xenograft T-Cell Model

[2065] Inhibition of melanoma tumour growth by lead antibody 1D05 in the hIgG1 LAGA (Seq ID No: 205) format was demonstrated in a NOD/SCID:xenograft T-cell model. T-cells were expanded in the presence of A375, a melanoma cell line, for 20 days in the presence of IL-2 and IL-7. T-cells were co-implanted subcutaneously with fresh A375 cells, then the antibody administered intraperitoneally after 1 hour. Tumour size and animal survival were monitored. Tumours in mice treated with antibody 1D05 were smaller than in animals treated with isotype control. Survival time in 1D05-treated mice was also increased.

[2066] Materials and Methods

[2067] Efficacy studies were performed using a T-cell/Xenograft model in NOD/SCID mice employing a refinement of the methods outlined in Stewart R et al. (Cancer Immunol. Res., 2015 September; 3(9):1052-62). Leukoreduction system chambers were obtained from NHSBT. HLA-A2 positive donors were selected by staining unfractionated blood using a PE-labelled anti-human HLA-A2 (Biolegend, Clone:

TABLE 11
Deimmunisation mutations to lead 1D05 antibody

| | | KD |
|---|---|---|
| Heavy Chain | Light Chain | (nM) |
| 1D05 - IgG1 disabled (LAGA) | 1D05 kappa (Seq ID No: 45) | 0.29 |
| Seq ID No: 299 | | |
| 1D05 V to A change in V_{H} (Seq | 1D05 kappa (Seq ID No: 45) | 0.33 |
| ID No: 47), IgG1 disabled (LAGA, | | |
| Seq ID No: 205) | | |
| 1D05 F to S change in V_{H} (Seq | 1D05 kappa (Seq ID No: 45) | 0.23 |
| ID No: 48), IgG1 disabled (LAGA, | | |
| Seq ID No: 205) | | |
| 1D05 V to A & F to S change in | 1D05 kappa (Seq ID No: 45) | 0.23 |
| V_{H} (Seq ID No: 342), IgG1 | | |
| disabled (LAGA, Seq ID No: 205) | | |
| 1D05 - IgG1 disabled (LAGA) | 1D05 kappa, V to A change | 2.66 |
| Seq ID No: 299 | (Seq ID No: 50) | |
| 1D05 V to A change in V_{H} (Seq | 1D05 kappa, V to A change | 2.8 |
| ID No: 47), IgG1 disabled (LAGA, | (Seq ID No: 50) | |
| Seq ID No: 205) | | |
| 1D05 F to S change in V_{H} (Seq | 1D05 kappa, V to A change | 1.94 |
| ID No: 48), IgG1 disabled (LAGA, | (Seq ID No: 50) | |
| Seq ID No: 205) | | |
| 1D05 V to A & F to S change in | 1D05 kappa, V to A change | 1.94 |
| V_{H} (Seq ID No: 342), IgG1 | (Seq ID No: 50) | |
| disabled (LAGA, Seq ID No: 205) | | |

BB7.2), the red blood cells were then lysed, followed by fixation with 4% PFA, prior to acquisition on the Attune flow cytometer. PBMCs were isolated by density gradient centrifugation over Ficoll. Primary human CD4⁺ and CD8⁺ T-cells were then isolated using an EasySep human CD4⁺ and CD8⁺ T-cell enrichment kit (Stemcell Technologies, Cat 19052 and 19053). The CD4⁺ and CD8⁺ T-cells were then cultured separately for 20 days on a monolayer of mitomycin C treated A375 cells (at day 10, T-cells were re-plated on a fresh A375 monolayer) in the presence of recombinant human IL-2 and IL-7 (Peprotech). On day 20 the cells were frozen in 90% hiFBS/10% DMSO at −80° C. in a “Mr Frosty” (Nalgene) and stored in liquid nitrogen until required. The day before starting an in vivo experiment the cells were thawed and placed in culture.

[2068] On the day of implantation, the CD4⁺ and CD8⁺ T-cells were counted and mixed together in a 1:1 ratio. The CD4⁺/CD8⁺ mixture was then added to A375 tumour cells and injected subcutaneously into mice on the rear right flank. Treated groups received their first dose of antibody or isotype control (all dosed intraperitoneally at 10 mg/kg) one-hour post implantation of the cells. The animals received further doses 3, 6, 8 and 10 days post-implantation. Tumour development was monitored three times a week using digital callipers measuring in two dimensions until end of the study. Tumour volumes (mm³) were estimated using a standard formula (L×W²)/2 (with L being the larger diameter, and W the smaller diameter of the tumour). Mice were kept on studies until their tumours developed to a mean diameter of 12 mm or they reached one of the humane endpoints outlined in the study protocol. The humane endpoint survival statistics were calculated using the Kaplan-Meier method with Prism. This approach was used to determine if PD-L1 treatment was associated with improved survival.

TABLE 12
Treatment Groups

| | Number of | |
|---|---|---|
| Groups | animals | Cell Line |
| 1 | 9 | 2 × 10⁶ A375 Cells |
| 2 | 9 | 1:6 ratio T-cells: A375 Cells (2 × 10⁶ A375 Cells) |
| 3 | 8 | 10 mg/kg isotype control hIgG1 |
| | | 1:6 ratio T-cells: A375 Cells (2 × 10⁶ A375 Cells) |
| 4 | 8 | 10 mg/kg anti-PD-L1 1D05 hIgG1 LAGA (Seq ID |
| | | No: 205) |
| | | 1:6 ratio T-cells: A375 Cells (2 × 10⁶ A375 Cells) |

[2069] Treatment with the isotype control had no effect on tumour development when compared to the group where the CD4⁺/8⁺ T-cells are co-injected with the tumour cells. Whilst treatment with the anti-PDL1 antibody 1D05 delayed the tumour development when compared to the Isotype Control. This is shown in FIG. 14.

[2070] All groups with T-cells co-injected with the tumours showed an increase in time on study when compared to the tumour alone group. Treatment with the isotype control had no effect on time on study, whilst treatment with the anti-PDL1 antibody 1D05 increased time on study when compared to all the other groups including the isotype control groups. Results are shown in FIG. 15.

### Example 18: Single Dose Study of Immunocytokines in Cynomolgus Monkeys

[2071] To assess pharmacodynamic and pharmacokinetic (PK) parameters in the most relevant animal model, male cynomolgus monkeys received a single dose of immunocytokine (ICK) at 1 mg/kg. Animals were observed for clinical manifestations of toxicity, and blood samples were taken over the course of 7 days for the analysis of PK, production of cytokines and characterisation of leukocyte subsets. The in-life phase of the study, and haematology, flow cytometry and cytokine analysis was performed at Envigo UK (study number GF13YC). Pharmacokinetic analysis was performed in-house.

[2072] Materials and Methods

[2073] Male cynomolgus monkeys of at least 2 years of age were used for the study and body weights were recorded at 7 days and 4 days before the start of the study. Immunocytokine constructs were formulated in 50 mM sodium acetate pH 5.5, at 1 mg/mL and were diluted to 0.2 mg/mL in physiological saline for intravenous infusion at a rate of 5 mL/kg/hour. Blood pressure and body temperature were monitored pre-treatment, 1 hour and 4 hours post end-of-dose. Animals were observed twice daily for signs of ill-health. The study was performed in two phases—initial doses of 1D05 HC IL-2 ICK and 1D05 LC D9-7 ICK to ensure dose level and PK timepoints were suitable, then dosing of 1D05 LC D9-7 ICK was repeated, alongside four further constructs (see Table 1). Phase 2 dosing of 1D05 LC D9-7 ICK is indicated by a (2) next to the construct name.

TABLE 13
Treatment groups and animal numbers

| Phase | Animal | Test Item |
|---|---|---|
| 1 | 134 | 1D05 HC IL-2 ICK |
| 1 | 135 | 1D05 LC D9-7 ICK |
| 2 | 136 | 1D05 LC IL-2 ICK |
| 2 | 137 | 1D05 LC D9-7 ICK (2) |
| 2 | 138 | 1D05 LC D9-2 ICK |
| 2 | 139 | 1D05 LC D1-8 ICK |
| 2 | 140 | 1D05 LC D1-9 ICK |

[2074] For haematological analysis, fasting blood samples were taken into EDTA treated tubes pre-treatment, and 2, 5 and 7 days post-treatment. Routine haematology parameters were measured by the Bayer Advia 120. Results are shown in FIGS. 16 and 17.

[2075] For analysis of cytokines and soluble CD25, blood samples were taken into EDTA-treated tubes pre-treatment and 3 days post-treatment, and plasma extracted by centrifugation at 2000 g for 10 minutes. Samples were frozen until analysis by multiplex MSD (cytokines) or commercial ELISA (soluble CD25). Results are shown in FIGS. 18 and 19.

[2076] For immunophenotyping, blood samples were taken into EDTA-treated tubes pre-treatment and 5 days post-treatment. Blood samples were stained with cocktails of directly conjugated monoclonal antibodies, then red blood cells were lysed and the samples fixed by re-suspension in phosphate buffered saline containing 1% formaldehyde prior to analysis. Results are shown in FIG. 20.

[2077] For PK analysis, blood samples were taken into untreated tubes pre-treatment, end of infusion (EOI), 2, 4, 8, 16, 24, 32, 40 and 48 hours after EOI, extended to 72 hours and 96 hours for Phase 2) and serum prepared by allowing the blood to clot, then centrifugation at 2000 g for 10 min. Serum samples were frozen on dry ice for shipment to Kymab. Results are shown in FIG. 21.

[2078] Pharmacokinetic Analysis of Serum Samples

[2079] a) PK Assay for Detection of Anti-PD-L1 Antibody

[2080] 50 μL/well of human PD-L1 Flag His (Seq ID No:505, in house) diluted to 2 μg/mL in PBS (Sigma, P3813-10PAK) was adsorbed to 96-well, high protein binding fluorescent plates (Greiner) overnight at 4° C. Excess protein was removed by washing 3× with 300 μL/well PBS-Tween (0.1% v/v) and the wells were blocked with 1% w/v bovine serum albumin (BSA, Sigma) in PBS for 1 hour at room temperature, after which plates were washed as described previously. Antibodies were diluted from 10,000 ng/mL to 9.77 ng/mL (1/2 dilution) in pooled cynomolgus serum (Seralab, CYNSRM) to give 12 standards including a blank. Standards, quality controls and samples were diluted at 1 in 50 MRD (minimum required dilution) in ELISA assay buffer (PBS+0.1% BSA) and were added to the coated 96-well high-binding plates at 50 μL/well. The plate was incubated for 1 hour at room temperature, after which plates were washed 3× with PBS-Tween. 50 μL biotinylated goat anti-human IgG (Southern Biotech) at 1 μg/mL was added to the plate. The plate was incubated for 1 hour at room temperature, after which plates were washed 3× with PBS-Tween. PD-L1 binding was detected using streptavidin labelled Europium (Perkin Elmer) diluted 1/1000 in DELFIA assay buffer (Perkin Elmer). Plates were washed with TBS (Tris buffered saline)-Tween (0.1% v/v) and 50 μL/well of DELFIA Enhancement solution (Perkin Elmer) was added to the plate. Time-resolved fluorescence was measured at 615 nm on an Envision plate reader (PerkinElmer). Concentrations were determined using GraphPad Prism software by interpolating from a standard curve fitted using a four-parameter logistic equation (Equation 4). Results are shown in FIGS. 21a and 21b.

[2081] b) PK Assay for Detection of Intact Immunocytokine (Antibody Fused to IL-2)

[2082] 50 μL/well of human PD-L1 Flag His (Seq ID No:505 in house) diluted to 3 μg/mL in PBS (Sigma, P3813-10PAK) was adsorbed to 96-well, low auto-fluorescent, high protein binding plates (Costar) overnight at 4° C. Excess protein was removed by washing 3× with 300 μL/well PBS-Tween (0.1% v/v) and the wells were blocked with 1% w/v bovine serum albumin (BSA, Sigma) in PBS for 1 hour at room temperature, after which plates were washed 3× with PBS-Tween. Antibodies were diluted from 50,000 ng/mL to 617.3 ng/mL in pooled cynomolgus serum (Seralab, CYNSRM) to give 10 standards including a blank. Standards, quality controls and samples were diluted at 1 in 20 MRD in ELISA assay buffer (PBS+0.1% BSA) and were added to the coated 96-well high-binding plates at 50 μL/well. The plate was incubated for 1 hour at room temperature, after which plates were washed 3× with PBS-Tween. 50 μL biotinylated anti-human IL-2 (Peprotech) at 2 μg/mL was added to the plate. The plate was incubated for 1 hour at room temperature, after which plates were washed as described previously. Binding was detected using streptavidin labelled Europium (Perkin Elmer) diluted 1/1000 in DELFIA assay buffer (Perkin Elmer). Plates were washed with TBS (Tris buffered saline)-Tween (0.1% v/v) and 50 μL/well of DELFIA Enhancement solution (Perkin Elmer) was added to the plate. Time-resolved fluorescence was measured at 615 nm on an Envision plate reader (PerkinElmer). Concentrations were determined using GraphPad Prism software by interpolating from a standard curve fitted using a four-parameter logistic equation. Results are shown in FIGS. 21c and 21d.

[2083] Results Summary

[2084] No signs of overt IL-2 mediated toxicity (fever, vascular leak, diarrhoea) were observed after dosing. Lymphocyte numbers increased over the duration of the study with the different immunocytokine constructs. The constructs with the greatest truncations induced the lowest levels of lymphocyte expansion; little expansion was observed with 1D05 LC D1-9 ICK or 1D05 LC D1-8 ICK over the seven-day period, whereas 1D05 LC D9-7 ICK and the full-length IL-2 induced significant expansion. The lymphopenia observed at day 2 with some constructs is indicative of lymphocyte margination out of the circulation. This is followed by a rebound lymphocytosis which can be seen at day 5 (FIG. 16).

[2085] Administration of immunocytokine constructs did not cause significant anaemia (FIG. 17). Around a 20% reduction in haemoglobin, haematocrit and red blood cell levels was observed at day 7 with the most active constructs (1D05 HC IL-2 ICK, 1D05 LC IL2 ICK and 1D05 LC D9-7 ICK), and around a 10% reduction with the other constructs. This agrees with anecdotal evidence from studies with IL-2 heavy chain immunocytokines. Thrombocytopenia (reduced platelet count) was not observed.

[2086] IL-2 was strongly increased 3 days post-dosing, indicative of production by activated T-cells. However, there is a possibility that the assay is cross-reactive for human IL-2 and so could also detect the immunocytokine. There was no clear up- or down-regulation of any of the other cytokines post-dosing, although there was a trend for down-regulation of IL-8 levels (FIG. 18). Levels of soluble CD25, which is a biomarker of T-cell activation, were strongly increased 3 days after dosing with immunocytokines (FIG. 19). Levels of soluble CD25 correlated with the in vitro stimulatory activity of the immunocytokines described in Example 13.

[2087] Dosing with immunocytokines increases the number of activated T-cells in the blood (FIG. 20). When dosed with 1D05 LC IL-2 ICK, total CD4⁺ and CD8⁺ cell numbers are increased, but CD69⁺ (early activation) and CD25⁺ (later activation) subsets are greatly increased, compared with pre-treatment levels. The increase in cell numbers is less striking for the truncated constructs. No significant changes in B-cell, NK cell or neutrophil numbers were observed, with a moderate increase in monocyte numbers. Data for the animal dosed with 1D05 LC D9-7 ICK is not available, due to clotting of the sample.

[2088] The light chain (LC) fusions have a longer half-life than the heavy chain (HC) fusion, which agrees with previous data in mouse (Gillies S D, Protein Engineering, Design and Selection, 26:10: 561-569, 2013). The half-life of 1D05 LC IL-2 ICK was around 8 hours, and the half-life of the truncated IL-2 constructs was around two-fold longer (FIGS. 21a and 21b). The increased half-life of immunocytokines with truncated IL-2, compared with full-length IL-2, may reflect reduced binding to IL-2 receptors.

[2089] A modified assay was used to detect intact immunocytokine i.e. antibody fused to IL-2 (FIGS. 21c and 21d). This result shows that the IL-2 part of the molecule remains fused in vivo and is not cleaved.

### Example 19—Extended Single Dose Study in Cynomolgus Monkeys

[2090] To determine the duration of lymphocytosis, and obtain more detailed analysis of T-cell subsets, an extended single dose study will be performed (study number HQ52PV). Female cynomolgus monkeys are dosed with 1 mg/kg immunocytokine as per Example 18 and monitored over at least 14 days. Cytokines will be analysed on days 1, 3, 7, 10 and 14, and pre-treatment. Haematology measurements will be performed on days 2, 5, 7, 10 and 14, and pre-treatment. Detection of soluble CD25 will be performed on days 3, 7 and 10, and pre-treatment. CD127 will be added to the immunophenotyping panel, to allow for detection of regulatory T-cells (CD3⁺CD4⁺CD25^{hi} CD127^{lo}), and analysis will be performed on days 1, 5, 7, 10 and 14, and pre-treatment. PK analysis will be performed as before. Treatment groups are shown in Table 14.

TABLE 14
Treatment groups and animal numbers

| Phase | Animal | Test Item |
|---|---|---|
| 3 | 378 | 1D05 LC IL-2 ICK |
| 3 | 379 | 1D05 LC D9-7 ICK |
| 3 | 380 | 1D05 LC D9-2 ICK |
| 3 | 381 | 1D05 LC D1-8 ICK |
| 3 | 382 | 1D05 LC D5-9 ICK |

[2091] No signs of overt IL-2 mediated toxicity (fever, vascular leak, diarrhoea) were observed after dosing. Lymphocyte numbers peaked at day 7 with all immunocytokine constructs. The constructs with the greatest truncations induced the lowest levels of lymphocyte expansion; the least expansion was observed with 1D05 LC D1-8 ICK, whereas 1D05 LC D9-7 ICK and the full-length IL-2 induced the greatest expansion. The lymphopenia observed at day 2 with some constructs is indicative of lymphocyte margination out of the circulation. This is followed by a rebound lymphocytosis (FIG. 28). Levels of soluble CD25, which is a biomarker of T-cell activation, peaked 3 days after dosing with immunocytokines (FIG. 29). Levels of soluble CD25 correlated with the in vitro stimulatory activity of the immunocytokines described in Example 13.

[2092] Administration of immunocytokine constructs did not cause significant anaemia (FIG. 30). A 10-20% reduction in haemoglobin, haematocrit and red blood cell levels was observed with the immunocytokine constructs. Haemoglobin levels remained lower over the entire time course in the animal dosed with 1D05 LC D1-8 ICK. Mild thrombocytopenia was observed with the two most active constructs at day 5, but levels recovered after this timepoint. IL-2 was strongly increased 3 days post-dosing, indicative of production by activated T-cells. However, there is a possibility that the assay is cross-reactive for human IL-2 and so these levels reflect the presence of the immunocytokine. There was no clear up- or down-regulation of any of the other cytokines post-dosing (FIG. 31).

[2093] As observed previously in Example 18, the half-life of 1D05 LC IL-2 ICK was around 8 hours, and the half-life of the truncated IL-2 constructs correlated with the size of the truncation (FIG. 32). The immunocytokine construct containing the longest truncation, D1-8, had the longest half-life, of approximately 24 hours. The increased half-life of immunocytokines with truncated IL-2, compared with full-length IL-2, may reflect reduced binding to IL-2 receptors.

[2094] Expansion of CD4⁺ and CD8⁺ T-cells is shown in FIG. 33. As observed for the automated cell counts, the degree of expansion correlates well with the size of the IL-2 truncation, the greatest expansion of both T-cell subsets observed in the animal dosed with 1D05 LC ICK D9-7.

### Example 20—Binding to Cell Endogenously Expressed hPD-L1 and Neutralisation of hPD-L1 Binding to PD-1 and CD80

[2095] Lead antibodies are tested for ability to bind to ES2 cells endogenously expressing hPD-L1 as well as the neutralisation of PD-L1/PD-1 interaction and PD-L1/CD80 interactions. ES2 cells endogenously expressing hPD-L1 (ATCC) are diluted in FACS buffer (PBS 1% BSA 0.1% sodium azide) and distributed to three 96-well, V-bottom plate (Greiner) at a density of 0.5-1×10⁵ cells per well. Cells are washed with 150 μL PBS and centrifuged at 300 g for 3 minutes. Supernatant is aspirated and 150 μL PBS added. This wash step is repeated.

[2096] To plate 1 (PD-L1 binding), 25 μL lead antibody, reference antibody or control antibody diluted in FACS buffer is added to the washed cells. 25 μL FACS buffer is added and cells are incubated at 4° C. for 60 minutes. 150 μL FACS buffer is added and cells washed as described above. To detect anti-PD-L1 antibody binding, anti-human PE (Jackson ImmunoResearch) is diluted 1/500 in FACS buffer and 50 μL of this mixture added to cells. Cells are incubated 4° C. for 60 minutes. Cells are washed twice with 150 μL FACS buffer, centrifuging at 300 g for 3 minutes after each wash step and aspirating supernatant. Cells are fixed by addition of 50 μL 4% paraformaldehyde and overnight incubation at 4° C. Cells are washed once as above and resuspended in FACS buffer for analysis. PE signal intensity (geometric mean) is measured by flow cytometry using a Beckman Coulter Cytoflex instrument. Data is plotted as geometric mean values without further calculation.

[2097] To plate 2 (PD-1 neutralisation) 25 μL lead antibody, reference antibody or control antibody diluted in FACS buffer is added to the washed cells. 25 μL of biotinylated human PD-1 (in-house, Fc-tagged, SEQ ID No:6) is added and cells are incubated at 4° C. for 60 minutes. Biotinylation is performed in-house using Lightning Link conjugation kit (Innova Biosciences) according to manufacturer's instructions. 150 μL FACS buffer is added and cells washed as described above. To detect biotinylated PD-1, Streptavidin-Alexa Fluor 647 (AF647, Jackson ImmunoResearch) is diluted 1/500 in FACS buffer and 50 μL of this mixture added to cells. Cells are incubated at 4° C. for 60 minutes. Cells are washed twice with 150 μL FACS buffer, centrifuging at 300 g for 3 minutes after each wash step and aspirating supernatant. Cells are fixed, washed and resuspended for analysis as above. APC signal intensity (geometric mean) is measured by flow cytometry. Data is plotted as geometric mean values without further calculation.

[2098] To plate 3 (CD80 neutralisation) 25 μL lead antibody, reference antibody or control antibody diluted in FACS buffer is added to the washed cells. 25 μL biotinylated human CD80 (Fc tagged, R&D Systems, 140-B1) is added and cells are incubated at 4° C. for 60 minutes. All other steps are performed as per plate 2.

[2099] Alternatively, to simultaneously detect binding and neutralisation, ES2 cells expressing hPD-L1 are diluted in FACS buffer and are distributed to two 96-well, V-bottom plate (Greiner) at a density of 0.5-1×10⁵ cells per well. Cells are washed with 150 μL PBS and centrifuged at 300 g for 3 minutes. Supernatant is aspirated and 150 μL PBS added. This wash step is repeated.

[2100] 25 μL lead antibody, reference antibody or control antibody diluted in FACS buffer is added to the washed cells. 25 μL biotinylated human PD-1 (R&D Systems, 8986-PD-100, his-tagged) or CD80 (R&D Systems, 9050-B1-100, his-tagged) is added and cells are incubated at 4° C. for 60 minutes. 150 μL FACS buffer is added and cells washed as described above. To detect biotinylated PD-1 or CD80 and anti-PD-L1 antibody binding, streptavidin-AF647 and anti-human PE are each diluted 1:500 in FACS buffer and 50 μL of this mixture added to cells. Cells are incubated at 4° C. for 60 minutes. Cells are washed twice with 150 μL FACS buffer, centrifuging at 300 g for 3 minutes after each wash step and aspirating supernatant. Cells are fixed, washed and resuspended for analysis as above. PE and APC signal intensity (geometric mean) are measured by flow cytometry. Data is plotted as geometric mean values without further calculation. Alternatively, an anti-his tag antibody conjugated to APC (R&D Systems) may be used to detect PD-1 or CD80, or PD-1 and CD80 may be directly labelled with AF647.

### Example 21—Testing of Lead Anti-PD-L1 Antibodies in Reporter Cell Bioassay

[2101] The ability of anti-PDL1 antibodies to neutralise PD-L1/PD-1 interaction on cells will be determined using a bioluminescence cell based assay (Promega®). PD-L1 aAPC/CHO-K1 cells, transfected with PD-L1 and a cell surface protein designed to promote TCR activation, are co-cultured with PD-1 expressing Jurkat cells. These cells also present a NFAT induced luciferase responsive element. Co-culture of the two cell types in the presence of an antibody able to block PD-1-PD-L1 interaction activates TCR signaling and NFAT-mediated luciferase activity.

[2102] The assay is run according to manufacturer's recommendations. Briefly, PD-L1 aAPC/CHO-K1 cells are cultured overnight in Hams F12 medium supplemented with 10% hiFBS. The next day, media is removed, effector PD-1 Jurkat cells and anti-PD-L1 antibodies are added to assay plates for 6 hours at 37° C. in RPMI 1640 supplemented with 1% hiFBS. Plates are read following 10 minutes of incubation with Bio-Glo™ on the Envision plate reader using luminescence settings. Antibody-induced luciferase activity is represented as fold induction compared to assay signal of wells showing background levels of response as defined by Equation 8. EC₅₀ values are calculated using a 4-parameter logistic fit (Equation 4).

Fold induction=sample well/basal luciferase response Equation 8
[2103] Basal luciferase response=value from wells containing PD-L1 CHO-K1 cells and PD-1 Jurkat cells

### Example 22—Pharmacokinetic Study of Lead Antibodies in hPD-L1 Expressing Mice

[2104] Lead antibodies, in human IgG1 effector enabled format (i.e. having a constant region of wild type IgG1, Seq ID No:341), are dosed intra-peritoneally at 10 mg/kg in mice expressing human PD-L1, eight mice per antibody. Blood samples are taken pre-treatment and at 2, 4, 8, 12, 24, 48, 72, 96, 192, 336, 508 and 672 hours. Serum is prepared and samples frozen until analysis. Samples will be analysed according to the method described for detection of antibody in Example 18 with the following exception: serum from C57BL/6 mice will be used as the vehicle in which to prepare standard curves and blanks. Minimum required dilution will differ from Example 18 due to the larger dose administered; this will be determined empirically.

### Example 23—Pharmacokinetic Study of Lead Antibodies in Non-Human Primates

[2105] Lead antibodies, in human IgG1 effector enabled format (i.e. having a constant region of wild type IgG1, Seq ID No:341), are dosed intravenously at 10 mg/kg in male cynomolgus monkeys, three animals per antibody. Blood samples are taken pre-treatment and at 2, 4, 8, 12, 24, 48, 72, 96, 192, 336, 508 and 672 hours. Serum is prepared and samples frozen until analysis. Samples will be analysed according to the method described for detection of antibody in Example 18. Minimum required dilution will differ from Example 18 due to the larger dose administered; this will be determined empirically.

### Example 24: Lead Antibody Activity in a Mouse B Cell:T-Cell Hybridoma Assay

[2106] Antibodies were tested in a murine B cell:T-cell hybridoma co-culture assay to assess induction of IL-2. 50 μL of human PD-L1 (SEQ ID No:1) transfected LK35.2 mouse B-lymphocyte hybridoma cells (ATCC) prepared in DMEM (Gibco) supplemented with 1% Foetal Bovine Serum (Gibco) were treated with 10 μM Ovalbumin₃₂₃₋₃₂₉ peptide (Thermo Scientific) and dispensed at a density of 2×10⁴ cells/well in a 96-well tissue culture treated plate (Costar). Ovalbumin peptide loaded cells were then mixed with 50 μL 1:3 titration series of anti-PD-L1 antibodies or anti-ICOS/PD-L1 bi-specific antibodies in a mAb²™ format from 30 nM for 9 concentration points in DMEM supplemented with 1% Foetal Bovine Serum.

[2107] Following 1 hour incubation at 37° C. 5% CO₂, 100 μL of murine T-helper hybridoma cell line DO-11-10 (National Jewish Health) cultured overnight in DMEM (Gibco) supplemented with 1% Foetal Bovine Serum (Gibco) were added to assay plate at 2×10⁴ cells/well. LK35.2/DO-11-10 co-culture was incubated overnight at 37° C. 5% CO₂ before supernatant was collected to assess production of mouse IL-2. Cells treated with 1 or 0.1× working stock of cell stimulation cocktail (eBioscience) were used as positive control for murine IL-2 production.

[2108] Mouse IL-2 quantification was performed using the mouse IL-2 Duoset ELISA kit (R&D Systems) following manufacturer's protocol, modified to include streptavidin-Europium as the detection reagent (DELFIA®). Briefly, assay plates were coated overnight at 4° C. with provided capture antibody prepared in PBS at 1 μg/mL. Plates were washed three times with PBS-Tween (0.1% v/v) before adding 200 μL of 1% w/v bovine serum albumin (BSA, Sigma) in PBS for 1 hour at room temperature. 50 μL cell supernatants were added to assay plates following a washing step performed as described previously. Following one hour incubation, 50 μL of provided detection antibody at 200 μg/mL prepared in 0.1% w/v BSA in PBS was added and plates were incubated for a further hour. Plates were washed as described above and 50 μL of DELFIA® Eu-N1 streptavidin diluted 1:500 from stock solution in DELFIA® assay buffer (Perkin Elmer) were added to all wells for 1 hour. An additional washing step was performed using DELFIA wash buffer (0.5 M Tris HCL (Gibco), 1% Tween v/v (Sigma)) before the addition of 50 μL DELFIA® Enhancement Solution (Perkin Elmer). The plate was incubated for 5 minutes at room temperature protected from the light and read at 615 nm using appropriate settings for DELFIA® time resolved fluorescence on an Envision plate reader (Perkin Elmer). The concentration of mouse IL-2 was interpolated from a standard curve run alongside test samples. Final plotted values were calculated using Equation 9, where background signal was calculated using assay signal of co-culture cells treated with 50 μL of media only. Results are shown in FIG. 23. All antibodies potently enhance production of IL-2 in this co-culture system.

Equation 9=Mouse IL-2 (pg/mL)−Background

TABLE 15
EC₅₀ values for induction of IL-2 by of PD-L1
antibodies in a murine T cell hybridoma assay

| | EC₅₀ (nM) | | |
|---|---|---|---|
| Antibody name | n = 1 | n = 2 | n = 3 |
| 1D05 | 0.33 | 0.21 | 0.21 |
| 84G09 | 0.24 | 0.14 | 0.17 |
| 413G05 | 0.29 | 0.11 | 0.29 |
| 414B06 | 0.59 | 0.30 | 0.18 |
| 416E01 | 0.19 | 0.15 | 0.14 |
| benchmark 2 | 0.26 | 0.13 | 0.13 |

TABLE 16
EC₅₀ values for induction of IL-2 by ICOS/PD-
L1 bi-specific mAb² ™ antibodies
in a murine T cell hybridoma assay

| | EC₅₀ (nM) | | |
|---|---|---|---|
| Bispecific antibody name | n = 1 | n = 2 | n = 3 |
| ICOS/PD-L1 bispecific 1 | 0.386 | n/a | 0.888 |
| Hybrid Control/PD-L1 bispecific | 0.247 | 0.311 | 0.162 |
| ICOS/PD-L1 bispecific 2 | 0.338 | 0.217 | 0.229 |
| PD-L1 benchmark | 0.122 | 0.128 | 0.123 |

### Example 25—Testing of Lead Antibodies in an Activated DC—T-Cell Mixed Lymphocyte Reaction

[2109] Monocytes were isolated from cryopreserved PBMCs by negative selection methods using a Monocyte Isolation Kit and the MACS™ magnetic separation system (Miltenyi Biotec). Monocytes were resuspended in RPMI 1640 medium containing 10% hiFBS and 100 ng/mL GM-CSF and IL-4 (both Peprotech). Cells were cultured for 5 days in non-TC treated 6-well plates (Greiner) to induce differentiation of DCs, before addition of 100 ng/mL lipopolysaccharide from E. coli 055:65 (Sigma) to activate the DCs. Cells were harvested after 24 hours of activation, and washed once with PBS to remove LPS, and resuspended at 10⁶/mL in RPMI 10% hiFBS. Allogeneic CD3⁺ T-cells were isolated from cryopreserved PBMC using a Pan T-Cell Isolation kit and the MACS system as above, and resuspended at 2×10⁶/mL in RPMI 10% hiFBS. Serial dilutions of selected antibodies (1:3) from 10 nM were prepared in RPMI 10% hiFBS and 50 μL added to 96-well, flat-bottomed TC plates plates in triplicate. DCs (100 μL) and T-cells (50 μL) were added to plates and incubated at 37° C., 5% CO₂ for five days. Supernatants were removed after three days for measurement of IL-2, and five days for measurement of IFNγ. Supernatants were stored at −20° C. until use. Cytokine production was measured with the R&D Systems Human IFNγ and IL-2 Duoset® ELISA, using DELFIA® Eu-N1 Streptavidin detection. Results are shown in FIG. 24.

### Example 26—Multi-Dose Study of Immunocytokines in Cynomolgus Monkeys

[2110] Pharmacology and toxicity of two immunocytokines, 1D05 D9-7 ICK and 1D05 D1-8 ICK (as described in Example 14), will be assessed in a multi-dose study in cynomolgus monkeys. Male juvenile monkeys are dosed with 1 mg/kg/dose according to two different regimens: Regimen 1—animals dosed on day 0 and day 14; regimen 2—animals dosed on day 0, 2, 14 and 16. Two animals will be dosed per group and monitored for 28 days. Treatment groups are shown in Table 17.

TABLE 17
Treatment groups for multi-dose study

| Treatment group | Construct | Regimen | Animals per group |
|---|---|---|---|
| 1 | 1D05 D9-7 ICK | 1 | 2 |
| 2 | 1D05 D9-7 ICK | 2 | 2 |
| 3 | 1D05 D1-8 ICK | 1 | 2 |
| 4 | 1D05 D1-8 ICK | 2 | 2 |

[2111] Heart rate, body temperature, respiration rate and blood pressure will be measured 1 hour and 4 hours after dosing. Body weight will be monitored daily. Cytokines will be analysed on days 2, 5, 7, 10, 14, 16, 19, 21, 24 and 28, and pre-treatment. Haematology measurements will be performed on days 2, 5, 7, 10, 14, 16, 19, 21, 24 and 28, and pre-treatment. Detection of soluble CD25 will be performed on days 3, 7 and 10, 17, 21, 24, and pre-treatment. Immunophenotyping will be performed on days 7, 10, 14, 24 and 28, and pre-treatment, according to the panel described in Example 19. Samples for pharmacokinetic (PK) analysis will be taken at the following timepoints at each infusion: pre-treatment, end of infusion, and at 8, 16, 24, 32, 40, 48, 72, and 96 hours.

### Example 27: Immunocytokine Efficacy Study in a Syngeneic Tumour Model

[2112] An efficacy study will be performed using a CT-26 mouse tumour model, to compare surrogate immunocytokine activity with unmodified antibody, and to assess the role of effector function. On the day of implantation, BALB/c mice are injected subcutaneously into mice on the rear right flank with 1×10⁵ CT-26 cells/animal. Treated groups will receive their first dose of antibody or relevant control (all dosed intraperitoneally at 10 mg/kg) 6 days post implantation of the tumour cells and will be dosed three times a week for a total of two weeks. Tumour development will be monitored three times a week using digital callipers measuring in two dimensions until end of the study. Tumour volumes (mm³) will be estimated using a standard formula (L×W²)/2 (with L being the larger diameter, and W the smaller diameter of the tumour). Mice are kept on studies until their tumours developed to a mean diameter of 12 mm or they reached the one humane endpoints outlined in the study protocol. The humane endpoint survival statistics will be calculated using the Kaplan-Meier method with Prism.

TABLE 18
Treatment groups for efficacy study

| | Number of | |
|---|---|---|
| Groups | animals | Treatment |
| 1 | 10 | 10 mg/kg hybrid control huIgG1_{LAGA} |
| | | (constant region SEQ ID No: 205) |
| 2 | 10 | 10 mg/kg hybrid control huIgG1_{LAGA} IL-2 |
| 3 | 10 | 10 mg/kg anti-PD-L1 huIgG1_{LAGA} |
| 4 | 10 | 10 mg/kg anti-PD-L1 huIgG1_{LAGA} IL-2 |
| 5 | 10 | 10 mg/kg anti-PD-L1 huIgG1 |
| | | (constant region SEQ ID No: 340) |
| 6 | 10 | 10 mg/kg anti-PD-L1 huIgG1 IL-2 |

### Example 28: Immunocytokine Efficacy Study in a T-Cell: Melanoma Cell Line Xenograft Model

[2113] An efficacy study will be performed using a T-cell: A375 cell line xenograft model in NOD/SCID mice employing a refinement of the methods outlined in R. Stewart et al. Briefly HLA-A2 positive donors are selected by staining whole blood using a PE labelled anti-human HLA-A2 antibody (Biolegend), followed by red blood cell lysis and analysis by flow cytometry. Primary human CD4⁺ and CD8⁺ T-cells will then be isolated, using an EasySep human CD4⁺ or CD8⁺ T-cell enrichment kit, Stemcell Technologies, Cat 19052/3). The CD4⁺ and CD8⁺ cells are then cultured separately for 20 days on a monolayer of mitomycin C treated A375 cells in the presence of IL-2 and IL-7. T-cells are plated on a fresh feeder layer of A375 at day 10. On day 20, the cells are cryopreserved and stored in liquid nitrogen till required. The day before implantation, T-cells are thawed and cultured in medium plus cytokines overnight. On the day of implantation, the CD4⁺ and CD8⁺ cells are counted and mixed together in a 1:1 ratio. The T-cells are mixed with fresh A375 tumour cells at 1:6 ratio and injected subcutaneously into mice on the rear right flank. Treated groups will receive their dose of antibody, immunocytokine or relevant control (all dosed intraperitoneally at 10 mg/kg) one-hour post implantation of the T-cells and tumour cells. Tumour development will be monitored three times a week using digital callipers measuring in two dimensions until end of the study. Tumour volumes (mm³) will be estimated using a standard formula (L×W²)/2 (with L being the larger diameter, and W the smaller diameter of the tumour). Mice are kept on studies until their tumours developed to a mean diameter of 12 mm or they reached the one humane endpoints outlined in the study protocol. The humane endpoint survival statistics will be calculated using the Kaplan-Meier method with Prism. This approach will be used to determine which treatment is/are associated with improved survival. Subsequent studies will compare the immunocytokine constructs with different IL-2 activities.

TABLE 19
Treatment groups for efficacy study

| | Number of | |
|---|---|---|
| Groups | animals | Treatment |
| 1 | 10 | 2 × 10⁶ A375 Cells |
| 2 | 10 | CD4⁺/CD8⁺ T cells: A375 Cells |
| 3 | 10 | 10 mg/kg hybrid control |
| | | CD4⁺/CD8⁺ T cells: A375 Cells |
| 4 | 10 | 10 mg/kg hybrid control IL-2 |
| | | CD4⁺/CD8⁺ T cells: A375 Cells |
| 5 | 10 | 200,000 IU recombinant human IL-2 |
| | | CD4⁺/CD8⁺ T cells: A375 Cells |
| | | (2 × 10⁶ A375 Cells) |
| 6 | 10 | 10 mg/kg 1D05 |
| | | CD4⁺/CD8⁺ T cells: A375 Cells |
| | | (2 × 10⁶ A375 Cells) |
| 7 | 10 | 10 mg/kg 1D05 LC IL-2 |
| | | CD4⁺/CD8⁺ T cells: A375 Cells |
| | | (2 × 10⁶ A375 Cells) |

### Example 29: Activity of Lead Antibodies in a Reporter Assay of Effector Function

[2114] The antibody-dependent cell-mediated cytotoxicity (ADCC) activity of selected antibodies was evaluated using an ADCC Reporter Bioassay. ES2 cells (ATCC CRL-1978) endogenously expressing human PD-L1 were co-incubated with effector cells (engineered Jurkat cells stably expressing human FcγRIIIa receptor—V158, Promega) that produce luciferase in a concentration-dependent manner in the presence of an ADCC-enabled antibody. The soluble luciferase activity is assessed by measuring the luminescence produced as the luciferase transformed a luminogenic substrate into a luminescent product.

[2115] Immediately prior to the assay, target cells (ES2) were centrifuged and resuspended in RPMI 1640+10% Ultra low IgG FBS (Thermo Fisher Scientific) and plated at 30,000 cells/well (10 μL/well) in 384-well white bottom plates. Jurkat NFAT luciferase reporter (effector) cells were resuspended in RPMI 1640+10% Ultra low IgG FBS and added to the target cells at 10,000 cells per well (10 μL/well). Eleven three-fold serial dilutions of antibodies were prepared from 2.2 nM in RPMI 1640+10% Ultra low IgG FBS and added to the target cells (10 μL/well). The plates were incubated overnight at 37° C., 5% CO₂, after which a luminogenic BioGlo substrate was added directly to the wells (30 μL/well) and luminescence quantified on an Envision (Perkin Elmer) plate reader.

[2116] Relative light unit (RLU) values from the raw data (Envision reads) were normalised to ‘Fold of induction using the following equation:

$$fold of induction = \frac{( RLU ( induced ) - RLU ( background ) )}{RLU ( background )} \qquad Equation 10$$

[2117] Data was plotted in GraphPad Prism, using a 4-parameter logistic fit, and a representative experiment is shown in FIG. 34. Results are summarised in Table 20. All antibodies tested induced luminescence, suggesting that all have the capacity to induce killing of target cells by ADCC. Although EC₅₀ values are generally similar, 416E01 induces a highest maximum level of luminescence.

TABLE 20
Summary of data from reporter cell assay

| | EC₅₀ (pM) | | | max fold induction | | |
|---|---|---|---|---|---|---|
| Antibody name | n = 1 | n = 2 | n = 3 | n = 1 | n = 2 | n = 3 |
| 1D05 | 24.14 | 21.53 | 34.71 | 13.70 | 16.69 | 25.04 |
| 84G09 | 24.95 | 15.30 | 25.90 | 16.33 | 22.21 | 33.82 |
| 413G05 | 21.92 | 20.87 | 27.52 | 13.22 | 16.41 | 23.45 |
| 414B06 | 19.08 | 15.02 | 24.24 | 10.94 | 20.15 | 31.51 |
| 416E01 | 79.98 | 10.58 | 22.86 | 32.11 | 33.76 | 60.16 |
| benchmark 2 | 24.81 | 10.56 | 24.93 | 19.55 | 31.88 | 43.23 |

### Example 30: Binding of Lead Antibodies to Cell-Expressed Cynomolgus PD-L1

[2118] CHO-S cells transfected with cynomolgus PD-L1 were diluted in FACS buffer (PBS+1% w/v BSA+0.1% w/v sodium azide) and were distributed to a 96-well V-bottom plate (Greiner) at a density of 1×10⁵ cells per well. Antibody titrations were prepared from 133 nM working concentration as a 1/3 dilution series in FACS buffer. Plates were centrifuged at 300×g for 3 minutes and supernatant aspirated. 50 μL per well of antibody titrations were added to cells and incubated at 4° C. for 1 hour. Cells were washed with 150 μL of PBS and centrifuged at 300 g for 3 minutes. Supernatant was aspirated and 150 μL PBS added per well. This wash step was repeated. Presence of bound antibody was detected by addition of 50 μL per well of anti-Human IgG AlexaFluor 647 (Jackson ImmunoResearch) diluted 1/500 in FACS buffer. Cells were incubated for 1 hour at 4° C. in the dark. Cells were washed as previously described. To fix cells, 50 μL per well of 4% v/v paraformaldehyde was added and cells incubated for 20 minutes at 4° C., cells were pelleted by centrifugation at 300×g and the plates resuspended in 75 μL PBS. Geometric mean was measured by flow cytometry using a Beckman Coulter CytoFLEX instrument. Alexa Fluor 647 was excited by a 637 nm laser and detected in the Red channel with a 660/20 bandpass filter. Data was analysed using FlowJo software and is shown in FIG. 35. All antibodies bind to cynomolgus PD-L1 expressed on cells.

### Example 31: Binding to CHO-Expressed hPD-L1 and Neutralisation of hPD-L1 Binding to PD-1 and CD80

[2119] CHO cells untransfected (referred to as WT) or transfected with hPD-L1 expressing recombinant human PD-L1 were diluted in FACS buffer (PBS 1% BSA 0.1% sodium azide) and distributed to three 96-well, V-bottom plate (Greiner) at a density of 1×10⁵ cells per well. Cells are washed with 150 μL PBS and centrifuged at 300 g for 3 minutes. Supernatant is aspirated and 150 μL PBS added. This wash step is repeated.

[2120] To plate 1 (PD-L1 binding), lead antibody, reference antibody or control antibody titrations were prepared from 150 nM working concentration as a 1/3 dilution series in FACS buffer. 50 μL of antibody diluted in FACS buffer is added to the washed cells and incubated at 4° C. for 60 minutes. 150 μL FACS buffer is added and cells washed as described above. To detect anti-PD-L1 antibody binding, anti-human PE (Jackson ImmunoResearch) is diluted 1/500 in FACS buffer and 50 μL of this mixture added to cells. Cells are incubated 4° C. for 60 minutes. Cells are washed twice with 150 μL FACS buffer, centrifuging at 300 g for 3 minutes after each wash step and aspirating supernatant. Cells are fixed by addition of 100 μL 4% paraformaldehyde and 30 mins at 4° C. Cells are washed once as above and resuspended in 100 μL FACS buffer for analysis. PE signal intensity (geometric mean) is measured by flow cytometry using a Beckman Coulter Cytoflex instrument. Data is plotted as geometric mean values without further calculation.

[2121] To plate 2 (PD-1 neutralisation), biotinylated human PD-1-Fc (in-house expressed, Seq ID No:6) were prepared as a titration from 1 μM final assay concentration (FAC), 1/2 dilution series in FACS buffer. Lead antibody, reference antibody or control antibody titrations were prepared from 300 nM working concentration, 150 nM FAC, as a 1/3 dilution series in FACS buffer. Biotinylated PD-1 were diluted in FACS buffer to 60 nM working concentration, 30 nM FAC. 25 μL PD-1 and 25 μL antibody solution (or 50 μL of PD1 titration) were added to cells and incubated at 4° C. for 1 hour. Biotinylation is performed in-house using Lightning Link conjugation kit (Innova Biosciences) according to manufacturer's instructions. 150 μL FACS buffer is added and cells washed as described above. To detect biotinylated PD-1, Streptavidin-Alexa Fluor 647 (AF647, Jackson ImmunoResearch) is diluted 1/500 in FACS buffer and 50 μL of this mixture added to cells. Cells are incubated at 4° C. for 60 minutes. Cells are washed twice with 150 μL FACS buffer, centrifuging at 300 g for 3 minutes after each wash step and aspirating supernatant. Cells are fixed, washed and resuspended for analysis as above. APC signal intensity (geometric mean) is measured by flow cytometry using a Beckman Coulter CYTOFLEX instrument. Data is plotted as percentage of receptor binding.

[2122] To plate 3 (CD80 neutralisation) Biotinylated human CD80 (Fc tagged, R&D Systems, 140-B1) were prepared as a titration from 1 μM final assay concentration (FAC), 1/2 dilution series in FACS buffer. Lead antibody, reference antibody or control antibody titrations were prepared from 300 nM working concentration, 150 nM FAC, as a 1/3 dilution series in FACS buffer. Biotinylated CD80 were diluted in FACS buffer to 60 nM working concentration, 30 nM FAC. 25 μL CD80 and 25 μL antibody solution (or 50 μL of CD80 titration) were added to cells and incubated at 4° C. for 1 hour. All other steps are performed as per plate 2.

$$Percentage of receptor binding ( flow cytometry )$$

$$\% of specific binding = \frac{sample value - non \text{-} specific binding}{total binding - non \text{-} specific binding} \times 100 \\ Total binding = biotinyled PD \text{-} 1 of CD 80 only ( Hybrid Control at 150 nM FAC ) \\ Non \text{-} specific binding = no PDL 1 binding , ( benchmark 2 at 150 nM FAC ) \qquad Equation 11$$

[2123] Results are shown in FIG. 36 and in Table 21. All lead antibodies neutralise interactions of PD-L1 with both PD-1 and CD80.

TABLE 21
Summary of neutralisation of PD-1
and CD80 interactions with PD-L1

| | | |
|---|---|---|
| Antibody | PD-1 IC₅₀ (nM) | CD80 IC₅₀ (nM) |

| name | n = 1 | n = 2 | n = 1 | n = 2 |
|---|---|---|---|---|
| 1D05 | 1.27 | 1.46 | 1.15 | 1.46 |
| 84G09 | 0.89 | 1.41 | 1.11 | 1.41 |
| 413G05 | 1.07 | 1.17 | 1.09 | 1.17 |
| 414B06 | 0.95 | 1.22 | 1.26 | 1.22 |
| 416E01 | 0.81 | 0.89 | 1.04 | 0.89 |
| benchmark 2 | 1.36 | 1.46 | 1.27 | 1.46 |

### Example 32: Effector Function of Lead Antibodies in a Primary NK Cell ADCC Assay

[2124] Activity of antibodies to kill PD-L1 expressing target cells via ADCC (antibody-dependent cell-mediated cytotoxicity) is measured by DELFIA cytotoxicity assay (Perkin Elmer) using human primary NK cells as effectors and ES2 as PD-L1+ target cells.

[2125] This method is based on loading target cells with an acetoxymethyl ester of fluorescence enhancing ligand (BATDA) which quickly penetrates the cell membrane. Within the cell the ester bonds are hydrolysed to form a hydrophilic ligand (TDA) which no longer passes the membrane. After cytolysis the ligand is released and can be detected by addition of Europium which forms with the BATDA a highly fluorescent and stable chelate (EuTDA). The measured signal correlates directly with the degree of cell lysis.

[2126] ES2 cells are resuspended at 10⁶/mL in assay medium (RPMI+10% ultra-low IgG FBS, from Gibco) and loaded with 5 μL/mL of BATDA reagent (Perkin Elmer) for 30 min at 37° C. Cells were then washed 3 times with 50 mL PBS (300×g for 5 min) and resuspended at 8×10⁵/mL in assay medium supplemented with 2 mM Probenecid (Life technologies) to reduce BATDA spontaneous release from the cells. Supernatant from ES2 cells immediately after final resuspension in assay medium is used as background control.

[2127] Seven serial three-fold dilutions of PD-L1 antibodies and isotype controls are prepared in assay media+2 mM Probenecid from 4 μg/mL (4× final concentration). NK cells are negatively isolated from fresh PBMC using Human NK Cell Isolation Kit (Miltenyi Biotec) as per manufacturer's instructions and resuspended at 4×10⁶/mL in assay medium+2 mM Probenecid. 50 μL of diluted Ab, 50 μL of BATDA loaded target cells, 50 μL of NK cells and 50 μL of assay medium+2 mM Probenecid (final volume of 200 μL/well) are added in each well to give an effector: target ratio of 5:1. Wells containing ES cells only or ES2 cells+DELFIA lysis buffer (Perkin Elmer) are used to determine spontaneous and maximum release, respectively.

[2128] Cells are incubated at 37° C., 5% CO2 for 4 hours before centrifugation of plates for 5 min at 500×g, and transfer of 50 μL of cell-free supernatant into a DELFIA microtitration Plates (Perkin Elmer). 200 μL of DELFIA Europium solution (Perkin Elmer) was added to the supernatants and incubated for 15 min at Room Temperature. Fluorescent signal was then quantified with an EnVision plate reader (PerkinElmer).

[2129] Background counts are subtracted from all experimental counts. Specific release is calculated according to the following equation:

$$\% specific release = \frac{( experimental release - spontaneous release )}{( maximum release - spontaneous release )} \times 100 \qquad Equation 12$$

### Example 33—TIGIT: Generation of Tool Reagents

[2130] The following example provides a detailed description of the generation of reagents used for immunisation and development of in vitro assays for screening and lead antibody characterisation.

[2131] Materials and Methods

[2132] a) Cloning and Expression of Recombinant Proteins

[2133] Recombinant proteins were generated in house using human and cyno TIGIT published nucleotide sequences (respectively Seq ID No: 542 and 553, which were cloned into appropriate mammalian expression vectors for transient expression in HEK 293 or CHO cells. The same methodology was used to produce human CD155 (Seq ID No: 572). Sequences of expressed antigens including affinity tags used for purification are detailed in sequence listing table when available: see Seq ID No: 539 and 545 (human TIGIT), Seq ID No: 554 and 555 (cyno TIGIT) and Seq ID No: 573 and 574 (human CD155).

[2134] b) Generation of Stably Transfected CHO and HEK 293 Cells Expressing Human and Mouse TIGIT:

[2135] Full length human (Seq ID No: 543) and mouse TIGIT sequences (Seq ID No: 558) were codon optimized for mammalian expression and cloned into an expression vector under the CMV promoter flanked by 3′ and 5′ piggyBac specific terminal repeat sequences, facilitating stable integration into the cell genome (see: “A hyperactive piggyBac transposase for mammalian applications”; Yusa K., et al., Proc. Natl. Acad. Sci. USA., 108(4): 1531-6, 2011 Jan. 25). Furthermore, the expression vector contained a puromycin selection cassette to facilitate stable cell line generation. The human and mouse expression plasmids were co-transfected with a plasmid encoding piggyBac transposase into HEK 293 and CHO-S cell lines using the FreeStyle Max transfection reagent (Invitrogen) per manufacturer instructions. 24 hours after transfection, the media was supplemented with puromycin and grown for at least two weeks to select a stable cell line with media being exchanged every 3 to 4 days. Confirmation of target expression on cells was investigated by flow cytometry using anti-human (R&D Systems, Catalogue number MAB7898) and anti-mouse (Biolegend, Catalogue number 142102) TIGIT commercial antibodies.

### Example 34—TIGIT: Immunisation and B-Cell Sorting Campaigns

[2136] This example describes in detail methods for immunisation and B-cell sorting campaigns for the generation of human anti-TIGIT antibodies using the KyMouse™ system (see, e.g., WO2011/004192, WO2011/158009 and WO2013/061098). To this end, genetically engineered mice containing a large number of human immunoglobulin genes were immunized following a number of regimens, including conventional intraperitoneal injections as well as a rapid immunisation at multiple sites (RIMMS; modified after Kilpatrick et al., (“Rapid development of affinity matured monoclonal antibodies using RIMMS”; Hybridoma. 1997 August; 16(4):381-9) (see detailed methods below). Immunisations were carried out using recombinant proteins (human and/or mouse TIGIT), HEK 293 cells (expressing human or mouse TIGIT) or a combination of both.

[2137] Immune response to conventional immunisation regimes (KM091, KM101 and KM116) was determined by DELFIA® Time-resolved fluorescence and on occasions also by flow cytometry using samples taken following prime and two protein and/or cell boosts. RIMMS immunised mice (KM115 and KM127) were sacrificed without indication of immune response prior sorting. At the end of each regime, secondary lymphoid tissue such as the spleen, and in some cases, the lymph nodes were removed. Tissues were prepared into a single cell suspension for sorting of antigen specific B-cells.

[2138] a) Immunisations

[2139] Genetically engineered HK and HL Kymouse™ strains, containing human immunoglobulin genes producing human kappa (HK) and lambda (HL) light chain antibodies (Lee et al., Nature Biotechnology, 32, 6-363, 2014) were immunized as summarised in Table 23.

TABLE 23
Immunisation campaigns

| Immunisa- | Animals | | |
|---|---|---|---|
| tion | immunised | Antigen | Regime* |
| KM091 | 1) 3x HL + | 1) human TIGIT-Fc (Seq ID | Conventional |
| | 3x HK | No: 545 or 546) | |
| | 2) 3x HL + | 2) flip-flop using human | |
| | 3x HK | TIGIT-Fc (Seq ID No: 545 | |
| | | or 546) and mouse TIGIT-Fc | |
| | | (Seq ID No: 561) | |
| KM101 | 1) 3x HL + | 1) flip-flop using human | Conventional |
| | 3x HK | TIGIT-Fc (Seq ID No: 545) | |
| | 2) 3x HL + | and human TIGIT HEK 293 | |
| | 3x HK | cells (Seq ID No: 543) | |
| | | 2) flip-flop using mouse | |
| | | TIGIT-Fc (Seq ID No: 561) | |
| | | and human TIGIT HEK 293 | |
| | | cells (Seq ID No: 543) | |
| KM115 | 2x HK v2.1 + | 1) human TIGIT-His/Flag | RIMMS |
| | 2x HL v2.1 | (Seq ID No: 539) | |
| | 2x HK v2.1 + | 2) co-administration of | |
| | 2x HL v2.1 | human TIGIT-His/Flag (Seq | |
| | | ID No: 539) and mouse | |
| | | TIGIT-His (Seq ID No: 560) | |
| KM116 | 2x HK v2.1 + | 1 immunisation arm | Conventional |
| | 2x HL v2.1 | using cells only | |
| | | Prime and Boost 1 co- | |
| | | administration of human | |
| | | (Seq ID No: 543) and mouse | |
| | | TIGIT HEK 293 cells (Seq | |
| | | ID No: 558); human HEK 293 | |
| | | cells delivered for boost 2, | |
| | | 3 and 4. | |
| KM127 | 3x HK v2.1 + | 1) mouse TIGIT-His (Seq ID: | RIMMS |
| | 3x HL v2.1 | 560) | |

*Conventional regime: prime followed by 4 boosts with 3 weeks' intervals; RIMMS: prime followed by 6 boots administrated over 2 weeks

[2140] b) Determining Serum Titres by DELFIA® Time-Resolved Fluorescence

[2141] Goat anti-mouse IgG capture antibody (Southern Biotech), prepared at 4 μg/mL in PBS, was added to high protein binding 96-well plates (Costar) (50 μL/well) and incubated overnight at 4° C. Next day excess IgG was removed by washing three times with PBS Tween (0.1% v/v) before wells were blocked with 1% w/v bovine serum albumin (BSA, Sigma) in PBS for 1 hour at room temperature. Following this blocking step, plates were washed again with PBS-Tween (0.1% v/v). Mouse serum samples were initially diluted 1:100 and titrated 1:10 in dilution buffer (0.1% w/v BSA in PBS) to generate an 8-point curve before addition to assay plates (50 μL/well). Anti-human TIGIT (R&D, Catalogue number MAB7898) and anti-mouse TIGIT (Biolegend, Catalogue number 142102) antibodies were titrated from 2 μg/ml using a 3-fold dilution series for a 11-point standard curve. Following 1 hour incubation at room temperature, plates were washed as detailed previously. 50 μL/well of biotinylated human (Seq ID No: 539 and 546) or mouse TIGIT (Seq ID No: 560 and 561), labelled in house using Sulfo-NHS-LC-Biotin (Thermo) was then added at 0.1 μg/ml to plates and incubated for 1 hour at room temperature. Excess biotinylated human/mouse TIGIT was removed by washing with PBS-Tween (0.1% v/v) before the addition of streptavidin-europium (Perkin Elmer) diluted 1/1000 in DELFIA® Assay Buffer (Perkin Elmer). Following 1 hour incubation at room temperature, plates were washed before the addition of 50 μL DELFIA® Enhancement Solution (Perkin Elmer). Plates were incubated for 5 minutes protected from light and read at 615 nm using appropriate settings for DELFIA® Time resolved fluorescence on an Envision plate reader (Perkin Elmer). Data was plotted onto Prism for analysis of responses for pre- and post-immunisation samples.

[2142] c) Determining Serum Titres by Flow Cytometry

Mouse serum samples were titrated in FACS buffer (PBS+1% w/v BSA+0.1% w/v sodium azide) as described in the previous methods section, as were antibody controls, validated for flow cytometry, binding to human (R&D Systems, Catalogue number MAB7898) or mouse TIGIT (eBiosciences, Catalogue number 12-9501-82). Control standard curves were composed of 11 points titrated 3-fold from 5 μg/mL and 20 μg/mL starting concentration for human and mouse reference antibodies respectively. Human TIGIT (Seq ID No: 543) and mouse TIGIT (Seq ID No: 558) CHO-S cells prepared at 4×10⁶ cells/mL were added to 96-well, v-bottom plates (Greiner) and pelleted following three washing steps in FACS buffer. 25 μL/well of each sample and controls were incubated with cells for one hour at 4° C. Cells were washed as described before adding 50 μL/well Alexa Fluor 647 AffiniPure Goat anti-Mouse IgG Fcγ Fragment Specific (Jackson ImmunoResearch) or Alexa Fluor 647 AffiniPure Goat Anti-Rat IgG (H+L) (Jackson ImmunoResearch), diluted 1:500 in FACS buffer. Following 30-minute incubation at 4° C. in the dark, cells were washed, pelleted and re-suspended in 4% paraformaldehyde (Affymetrix) for 20 minutes. Final washing step removed fixing solution before re-suspending cells in 100 μL FACS buffer. Flow cytometry was performed using BD FACS Array instrument and Kaluza® to quantify 647 geometric mean of each sample. Quantification of response to immunisation was performed by comparing assay signal of samples collected pre- and post-immunisation to assess whether a target specific response and not directed to cells had been raised.

[2143] d) B-Cell Sorting

[2144] B-cell sorting was performed as previously described in Example 1 of PCT application WO2015/040401. In brief, splenocytes and lymph node cells, if following RIMMS immunisations, were isolated from immunised mice and stained with an antibody cocktail containing markers for the selection of B-cells (CD19) and exclusion of unwanted cells (IgM, IgD, 7AAD). CD19⁺ B-cells specific to target were sorted by detecting binding to human TIGIT-647 (Seq ID No: 539 or Seq ID No: 546) and mouse TIGIT-488 (Seq ID No: 560), (in-house labelling using Lightning Link™ kits). Gating strategy was designed in a way that cells binding to human TIGIT, mouse TIGIT or both were single cell sorted by flow cytometry into lysis buffer. V-region sequences were recovered using RT-PCR and two further rounds of PCR, then bridged to mouse IgG1 constant region and expressed in HEK 293 cells. Supernatants from HEK 293 cells were screened for the presence of TIGIT binding antibodies. This method is hereafter referred to as BCT. A summary of the sorting campaigns is detailed in Table 24, which includes the number of sorted and transfected plates and total number of clones screened in downstream assays.

TABLE 24
B-cell sorting campaigns

| | Sorted | | Screened |
|---|---|---|---|
| Sorting | plates | Transfected plates | clones |
| KM091-B1 | 18 | 16*82 wells | 1372 |
| KM091-B2 | 27 | 2*82 wells | 220 |
| | | 1*56 wells | |
| KM101-B1 | 24 | 23*82 wells | 1886 |
| KM101-B2 | 11 | 9*82 wells | 863 |
| | | 1*73 wells | |
| | | 1*52 wells | |
| KM115-B1 | 12 | 12*82wells | 984 |
| KM116-B1 | 16 | 15*82 wells | 1297 |
| | | 1*67 wells | |
| KM127-B1 | 24 | 14*82 wells | 1148 |

### Example 35—TIGIT: BCT Primary Screening

[2145] The following example details assays and selection process used to identify panel of primary hits. HTRF® (Homogeneous Time-Resolved Fluorescence, Cisbio) assays were set up to detect antibodies in BCT supernatants able to bind to human (Seq ID No: 539), mouse (Seq ID No: 560 and 561) and cyno TIGIT (Seq ID No: 554) and block interaction of target to human CD155 (Seq ID No: 575). Screening of KM091-B1 BCT supernatants also included checking of binding to human TIGIT (Seq ID No: 543) on cells and binding to mouse TIGIT recombinant protein (Seq ID No: 560) by DELFIA® Time-resolved Fluorescence.

[2146] Assays and working concentrations used for each screening are listed in Table 25. Concentration of reagents was on occasions adjusted to optimise assay to different batches of proteins used. Table 25 also informs of cut-offs applied to select clones to re-test in secondary screening assays.

TABLE 25
Assays and criteria for primary hit selection

| | | | Working | | |
|---|---|---|---|---|---|
| Campaign | Assay | Protein ID | concentrations | | % Effect cut-off |
| KM091 - B1 | HTRF - binding | Human TIGIT-His/Flag (Seq ID No: 539) | 15 | nM | >5% |
| | to human TIGIT | | | | |
| | HTRF - Human | Human TIGIT-Fc (Seq ID No: 545) | 7.5 | nM | <70% |
| | TIGIT/CD155 | Human CD155-His (Seq ID No: 575) | 12.5 | nM | |
| | neutralisation | | | | |
| | ELISA - binding | Mouse TIGIT-His (Seq ID No: 560) | 0.5 | μg/mL | Mean + 3* Standard deviation |
| | Mouse TIGIT | | | | negative control |
| KM091-B2 | HTRF - binding | Human TIGIT-His/Flag (Seq ID No: 539) | 15 | nM | >5% |
| | to human TIGIT | | | | |
| | HTRF - binding | Mouse TIGIT-His (Seq ID No: 560) | 5 | nM | >5% |
| | to mouse TIGIT | | | | |
| | HTRF - binding | Cyno TIGIT-Flag/His (Seq ID No: 554) | 15 | nM | >10% |
| | to Cyno TIGIT | | | | |
| | HTRF- Human | Human TIGIT-Fc (Seq ID No: 545) | 0.25 | nM | <65% |
| | TIGIT/CD155 | Human CD155-His (Seq ID No: 575) | 1 | nM | |
| | neutralisation | | | | |
| KM101-B1 | HTRF - binding | Human TIGIT-His/Flag (Seq ID No: 539) | 15 | nM | >10% |
| | to human TIGIT | | | | |
| | HTRF - binding | Mouse TIGIT-His (Seq ID No: 560) | 5 | nM | Mean + 3* Standard deviation |
| | to mouse TIGIT | | | | negative control |
| | HTRF - binding | Cyno TIGIT-Flag/His (Seq ID No: 554) | 15 | nM | >10% |
| | to Cyno TIGIT | | | | |
| | HTRF- Human | Human TIGIT-Fc (Seq ID No: 545) | 0.25 | nM | <65% |
| | TIGIT/CD155 | Human CD155-His (Seq ID No: 575) | 1 | nM | |
| | neutralisation | | | | |
| KM101-B2 | HTRF - binding | Human TIGIT-His/Flag (Seq ID No: 539) | 15 | nM | >5% |
| | to human TIGIT | | | | |
| | HTRF- binding | Mouse TIGIT-His (Seq ID No: 560) | 5 | nM | >5% |
| | to mouse TIGIT | | | | |
| | HTRF - binding | Cyno TIGIT-Flag/His (Seq ID No: 554) | 15 | nM | >5% |
| | to Cyno TIGIT | | | | |
| | HTRF- Human | Human TIGIT-Fc (Seq ID No: 545) | 0.25 | nM | <70% |
| | TIGIT/CD155 | Human CD155-His (Seq ID No: 575) | 1 | nM | |
| | neutralisation | | | | |
| KM115-B1 | HTRF - binding | Human TIGIT-His/Flag (Seq ID No: 539) | 15 | nM | >5% |
| | to human TIGIT | | | | |
| | HTRF - binding | Mouse TIGIT-His (Seq ID No: 560) | 5 | nM | >5% |
| | to mouse TIGIT | | | | |
| | HTRF - binding | Cyno TIGIT-Flag/His (Seq ID No: 554) | 15 | nM | >5% |
| | to Cyno TIGIT | | | | |
| | HTRF- Human | Human TIGIT-Fc (Seq ID No: 545) | 0.25 | nM | <70% |
| | TIGIT/CD155 | Human CD155-His (Seq ID No: 575) | 1 | nM | |
| | neutralisation | | | | |
| KM116-B1 | HTRF - binding | Human TIGIT-His/Flag (Seq ID No: 539) | 15 | nM | >5% |
| | to human TIGIT | | | | |
| | HTRF - binding | Mouse TIGIT-His (Seq ID No: 560) | 5 | nM | >10% |
| | to mouse TIGIT | | | | |
| | HTRF - binding | Cyno TIGIT-Flag/His (Seq ID No: 554) | 15 | nM | >5% |
| | to Cyno TIGIT | | | | |
| | HTRF- Human | Human TIGIT-Fc (Seq ID No: 545) | 0.25 | nM | <70% |
| | TIGIT/CD155 | Human CD155-His (Seq ID No: 575) | 1 | nM | |
| | neutralisation | | | | |
| KM127-B1 | HTRF - binding | Human TIGIT-His/Flag (Seq ID No: 539) | 15 | nM | >5% |
| | to human TIGIT | | | | |
| | HTRF - binding | Mouse TIGIT-His (Seq ID No: 560) | 5 | nM | >5% |
| | to mouse TIGIT | | | | |
| | HTRF - binding | Cyno TIGIT-Flag/His (Seq ID No: 554) | 15 | nM | >5% |
| | to Cyno TIGIT | | | | |
| | HTRF- Human | Human TIGIT-Fc (Seq ID No: 545) | 0.25 | nM | <70% |
| | TIGIT/CD155 | Human CD155-His (Seq ID No: 575) | 1 | nM | |
| | neutralisation | | | | |

[2147] Clones showing the ability to bind to human and cyno TIGIT if also able to neutralise the interaction of target with human CD155 were selected for secondary screen. Potential mouse cross-reactive or mouse only binders were taken forward for further characterisation regardless of their neutralisation profile. A summary of primary hits identified following each screening campaign is captured in Table 26.

TABLE 26
Primary screening campaigns

| | Binding to | Binding to | Binding to | TIGIT:CD155 | |
|---|---|---|---|---|---|
| Screening | human TIGIT | mouse TIGIT | cyno TIGIT | neutralisation | Primary |
| campaign | (HTRF/Envision) | (HTRF) | (HTRF) | (HTRF) | hits |
| KM091-B1 | 80 | 322 (ELISA) | Not tested | 144 | 125 |
| | 336 (Envision) | | | | |
| KM091-B2 | 86 | 1 | 37* | 58 | 56 |
| KM101-B1 | 103 | 0 | 95 | 103 | 65 |
| KM101-B2 | 152 | 1 | 127 | 95 | 59 |
| KM115-B1 | 48 | 5 | 38 | 34 | 10 |
| KM116-B1 | 56 | 14 | 64 | 51 | 32 |
| KM127-B1 | 56 | 97 | 92 | 27 | 97 |

*binding to cyno TIGIT was assessed at the secondary screening stage but included in this table for simplification purposes.

[2148] Materials and Methods

[2149] a) Binding to Recombinant Human, Mouse and Cyno TIGIT by HTRF®

[2150] 5 μL BCT supernatants were transferred to a white 384 well, low-volume, non-binding surface polystyrene plate (Greiner). In addition, 5 μL of 12 nM anti-human TIGIT (MAB7898), 12 or 40 nM cyno cross-reactive anti-human TIGIT (eBiosciences, catalogue number MBSA43) or 4 nM anti-mouse TIGIT (142102, Biolegend) were prepared in Expi293™ culture media and added to total binding wells. Non-specific binding wells included the appropriated isotype controls at assay concentrations used for reference molecules. Control curves were added on to a separate plate, using reference and isotype antibodies titrated from 120 nM in EXPI293™ culture media as per 3-fold dilution series for the generation of a 11-point binding curve. 5 μL of 647-labelled human, mouse or cyno TIGIT prepared in HTRF assay buffer (PBS (Sigma)+0.53 M KF (Sigma)+0.1% w/v BSA (Sigma)) at concentrations listed in Table 25 were added to whole plate. Finally, 10 μL of goat anti-mouse IgG (Southern Biotech) labelled with Europium cryptate (Cisbio) diluted at 1/1000 in HTRF assay buffer was added to assay plates, which were then incubated protected from light for 3 hours at room temperature. Plates were read using an EnVision plate reader (Perkin Elmer) for measurement of wells at 620 nm and 665 nm emission wavelengths. More details of the HTRF® assay technology can be found in Mathis (1995) Clinical Chemistry 41(9), 1391-1397.

[2151] Data were analysed by calculating 665/620 ratio (Equation 13) and percentage of effect (Equation 14) for each sample.

$$Calculation of 665 \text{/} 620 ratio$$

$$\begin{matrix} 665 \text{/} 620 ratio = ( sample 665 \text{/} 620 nm value ) \\ Calculation of percentaage of effect & Equation 13 \\ Percentage of effect = \frac{( sample well - non \text{-} specific binding )}{Total binding - non \text{-} specific binding} \times 100 \\ Non \text{-} specific binding = values from wells containing isotype control antibody \\ Total Binding = values from wells containing reference antibody & Equation 14\end{matrix}$$

[2152] b) Binding to Human TIGIT CHO Cells

[2153] 80 μL of CHO-S cells expressing human TIGIT (Seq ID No: 543) were re-suspended in F12 media (Gibco) supplemented with 10% Foetal Bovine Serum (Gibco) and dispensed at a density of 4×10⁴ cells per well in black walled 384 well, clear bottom Poly-D-Lysine plates (Greiner). Plates were incubated overnight at 37° C. 5% CO₂ to allow for cells to bind to plates. The next day media was aspirated before adding 40 μL of BCT supernatant, reference and isotype control antibodies. Anti-human TIGIT antibody (R&D, Catalogue number MAB7898) and relevant isotype controls were prepared at 10 nM final assay concentration in Expi293™ media (Gibco) and added to total and non-specific binding wells or titrated using a three-fold dilutions series from 30 nM final assay concentration in Expi293™ media. Before addition of secondary detection and cell dye, plates were incubated for 1 hour at 4° C. to allow antibody binding to target. After incubation, media was aspirated to remove unbound antibodies. Secondary antibody (Alexa Fluor® 647 Goat anti-mouse IgG Fcγ Fragment Specific (JacksonImmunoResearch) and Vybrant® DyeCycle™ Green stain (ThermoFischer) were added at 3 μg/mL and 1/500 dilution respectively in buffer ((PBS (sigma)+1% BSA (Sigma)+0.1% Sodium Azide (SevernBiotech)). Plates were then incubated at 4° C. for a further hour, before aspiration of unbound secondary antibody and fixation of cells for 20 minutes with 4% paraformaldehyde (Affymetrix). To remove fixative plates were washed once with PBS (Sigma) and blotted to remove excess liquid before measurement at 665 nM and 485 nM emission wavelengths using an EnVision plate reader (Perkin Elmer). Data were analysed by calculating 665/485 ratio (Equation 15) and percentage of effect (Equation 16) for each sample.

$$Calculation of 665 \text{/} 485 ratio$$

$$\begin{matrix} 665 \text{/} 485 ratio = ( sample 665 \text{/} 485 nm value ) \\ Calculation of percentage of effect \\ Using 665 \text{/} 485 nm ratio ( see equation 15 ) & Equation 15 \\ Percentage of effect = \frac{sample value - non \text{-} specific binding}{total binding - non \text{-} specific binding} \times 100 \\ Non \text{-} specific binding = values from wells containing isotype control antibody \\ Total Binding = values from wells containing reference antibody & Equation 16\end{matrix}$$

[2154] c) Binding to Mouse TIGIT by DELFIA® Time-Resolved Fluorescence

[2155] Mouse TIGIT (Seq ID No: 560), prepared at 0.5 μg/mL in PBS, was added to high protein binding 96-well plates (Costar) (50 μL/well) and incubated overnight at 4° C. Excess IgG was removed by washing three times with PBS Tween (0.1% v/v) before wells were blocked with 1% w/v bovine serum albumin (BSA, Sigma) in PBS for 1 hour at room temperature. Following this blocking step, plates were washed again three times with PBS-Tween (0.1% v/v) before the addition of 50 μL/well of BCT supernatants to plates. Reference anti-mouse TIGIT (Biolegend, Catalogue number 142102) and isotype control antibody were prepared in dilution buffer (0.1% w/v BSA in PBS) at 10 nM final assay concentration in Expi293™ media (Gibco) and added to total and non-specific binding control wells. Binding curve was prepared using reference and isotype control antibodies titrated 1:3 from 30 nM final assay concentration in Expi293™ media. Following 1 hour incubation at room temperature, plates were washed as detailed previously. 50 μL/well of DELFIA® Eu-N1 Rabbit Anti-Mouse IgG (Perkin Elmer) diluted 1/1000 in DELFIA® assay buffer (Perkin Elmer) was added to plates and incubated for 1 hour at room temperature. Unbound DELFIA® Eu-N1 Rabbit Anti-Mouse IgG was removed by washing with DELFIA wash buffer (0.5 M Tris HCL, 1% tween v/v) before the addition of 50 μL DELFIA® Enhancement Solution (Perkin Elmer). Plates were protected from light and incubated for 5 minutes at room temperature, before being read at 615 nm using appropriate settings for DELFIA® Time resolved fluorescence on an Envision plate reader (Perkin Elmer). Assay values of total binding and non-specific wells were used to calculate z′ prime and assay window. Clones were considered cell binders if raw data counts were above cut off calculated as defined by Equation 17.

Cut off Average non-specific binding+3*standard deviation non-specific binding Equation 17: Calculation of cut off

[2156] Non-specific binding=values from wells containing isotype control antibody

[2157] d) TIGIT/CD155 Receptor-Ligand HTRF® Assay

[2158] 5 μL BCT supernatants were transferred to a white 384 well, low-volume, non-binding surface polystyrene plate (Greiner) and mixed with 5 μL of human TIGIT-Fc prepared in HTRF assay buffer (PBS (Sigma)+0.53 M KF (Sigma)+0.1% w/v BSA (Sigma)). Control curves were added on separate plates using anti-human TIGIT (MAB7898) and isotype control antibodies prepared at 120 nM working concentration in EXPI293™ culture media and titrated as per 1:3 dilution curve for a curve composed of 11 concentration points. Plates were incubated for 1 hour at room temperature to allow antibody-receptor interaction to occur. Following this incubation time, 5 μL of 647-CD155-His diluted in HTRF buffer assay buffer were added to plates except non-specific binding wells, which included 5 μL of HTRF buffer. 5 μL of a solution composed of anti-human Fc cryptate (Cisbio) at 1/100 in HTRF assay buffer was added to all wells. Plates were incubated for 3 hours at room temperature and protected from light before measurement of wells at 620 nm and 665 nm emission wavelengths using an EnVision plate reader (Perkin Elmer). Data were analysed by calculating 665/620 ratio (Equation 13) and percentage of CD155 specific binding (Equation 18) for each sample. Total binding was defined by assay signal of wells with TIGIT-Fc and 647-CD155-His, while non-specific binding was established by measuring assay signal of wells with TIGIT-Fc only.

$$Percentage of CD 155 specific binding$$

$$Using 665 \text{/} 620 nm ratio ( see equation 13 ) ( HTRF )$$

$$Percentage of CD 155 specific binding = \frac{sample value - non \text{-} specific binding}{total binding - non \text{-} specific binding} \times 100 \\ Total binding = 647 \text{-} CD 155 \text{-} His + TIGIT \text{-} Fc + EXPI 293 culture media + anti \text{-} human Fc cryptate \\ Non \text{-} specific binding = TIGIT \text{-} Fc + EXPI 293 culture media + anti \text{-} human Fc cryptate \qquad Equation 18$$

### Example 36: TIGIT: BCT Secondary Screening

[2159] Binding of primary hits to target in a cellular context was investigated using human (Seq ID No: 543) and mouse TIGIT (Seq ID No: 558) transfected CHO-S cells by flow cytometry, while SPR was used to determine Kds to human (Seq ID No: 539), cyno (Seq ID No: 554) and mouse (Seq ID No: 560) recombinant proteins. Secondary hits are confirmed cell binders with an affinity to human TIGIT equal or below 10 nM and cyno TIGIT Kd within 10-fold. Process of selection is summarised in Table 27.

TABLE 27
Secondary screening campaigns

| | Binding to | Binding to | Binding to | |
|---|---|---|---|---|
| Screening | human TIGIT | mouse TIGIT | human TIGIT | Secondary |
| campaign | (FACS) | (FACS) | (SPR) | hits |
| KM091-B1 | 37 | 125 | 70 | 40 |
| KM091-B2 | 53 | 0 | 56 | 10 |
| KM101-B1 | 56 | 0 | 52 | 25 |
| KM101-B2 | 59 | Not tested | 51 | 38 |
| KM115-B1 | 1 | Not tested | 2 | 5 (mouse |
| | | | | binders) |
| KM116-B1 | 21 | 0 | 19 | 32 |
| KM127-B1 | 0 | 0 | 0 to human TIGIT | 60 |
| | | | 30 to mouse TIGIT | |

[2160] Methods

[2161] a) Binding to Human and Mouse TIGIT CHO Cells by Flow Cytometry

[2162] 50 μL of untransfected, human (Seq ID No: 543) or mouse TIGIT (Seq ID No: 558) CHO cells prepared at 4×10⁶ cells/mL were added to 96-well, v-bottom plates (Greiner) and pelleted following three washing steps in FACS buffer (PBS+1% w/v BSA+0.1% w/v sodium azide). 25 μL/well of BCT supernatants were incubated with cells for one hour at 4° C., as well as positive and negative controls for binding. Total binding was defined by 0.5-1 μg/mL anti-human TIGIT (R&D, Catalogues number MAB7898), 0.5-1 μg/mL anti-mouse TIGIT (Biolegend, Catalogue number 142102) or 3 μg/mL anti-mouse TIGIT (Thermo Fisher Scientific, Catalogue number 12-9501-82) and appropriate isotype controls in EXPI293™ media. Reference antibodies and isotype control antibodies were prepared at 10 μg/mL working concentration in EXPI293™ culture media and titrated as per 1:3 dilution curve for control curve of 11 concentration points. Cells were washed as described previously before adding 50 μL/well Alexa Fluor 647 AffiniPure Goat anti-Mouse IgG Fcγ Fragment Specific (Jackson ImmunoResearch) or Alexa Fluor 647 AffiniPure Goat Anti-Rat IgG (H+L) (Jackson ImmunoResearch), diluted 1:500 in FACS buffer. Following a 30-minute incubation at 4° C. in the dark, cells were washed, pelleted and re-suspended in 4% paraformaldehyde (Affymetrix) for 20 minutes. Final washing step removed fixing solution before cells were re-suspended in 100 μL FACS buffer. Flow cytometry was performed using BD FACS Array instrument and Kaluza®/FlowJo® to quantify 647 geometric mean of each tested sample. Clones were confirmed as cell binders if presenting a geometric mean value above three times standard deviation of isotype control in transfected cells. Specific binding was confirmed if no binding was detected to untransfected cells using the same cut-off criteria as used for the TIGIT transfected cells.

[2163] b) Determination of Affinity by Surface Plasmon Resonance (SPR)

[2164] Affinity of secreted antibodies was assessed by testing BCT supernatants by Label-free surface plasmon resonance (SPR). This analysis was carried out on the ProteOn XPR36 (BioRad) array SPR machine. An anti-mouse IgG capture surface was created on a GLM biosensor chip using amine coupling of an anti-mouse IgG from GE Healthcare. Test antibodies were captured on this surface and human (Seq ID No: 539), mouse (Seq ID No: 560) and cyno TIGIT (Seq ID No: 554) were used as analyte. The assay was carried out at 25° C. using HBS-EP (Teknova H8022). Buffer alone was used to reference the binding sensograms. The data was analysed using the 1:1 model inherent to the ProteOn XPR36 analysis software.

### Example 37: TIGIT: Identification of Lead Panel (1)

[2165] Antibodies were reformatted with a human IgG4 constant region and expressed in HEK 293 or CHO cells and purified using standard methods. Sequencing was performed by Source Bioscience and results were added to sequence listing table (Seq ID No: 597-Seq ID No: 752). V gene usage is listed in Table 28.

TABLE 28
V Gene usage for Lead panel (1)

| | Heavy Chain | | | | | Light Chain | | | |
|---|---|---|---|---|---|---|---|---|---|
| | | | | | CDR3 | | | | CDR3 |
| | | | | | mutations | | | | mutations |
| Antibody | V | D | J | CDR3 | from | V | J | CDR3 | from |
| CLONE ID | gene | gene | gene | length (aa) | germline (aa) | gene | gene | length (aa) | germline (aa) |
| KY01 | IGHV3-9*01 | IGHD6-19*01 | IGHJ6*02 | 14 | 3 | IGKV2-28*01 | IGKJ4*01 | 9 | 1 |
| KY02 | IGHV3-11*01 | IGHD3-10*01 | IGHJ4*02 | 14 | 6 | IGKV1D-39*01 | IGKJ2*04 | 9 | 1 |
| KY03 | IGHV3-15*01 | IGHD3-9*01 | IGHJ4*02 | 12 | 5 | IGLV3-1*01 | IGLJ2*01 | 9 | 0 |
| KY04 | IGHV4-4*02 | IGHD3-9*01 | IGHJ6*02 | 19 | 5 | IGLV3-10*01 | IGLJ3*02 | 11 | 3 |
| KY05 | IGHV3-9*01 | IGHD6-19*01 | IGHJ4*02 | 16 | 6 | IGKV2-28*01 | IGKJ2*04 | 9 | 0 |
| KY06 | IGHV3-9*01 | IGHD6-19*01 | IGHJ4*02 | 16 | 7 | IGKV2-28*01 | IGKJ2*04 | 9 | 0 |
| KY07 | IGHV3-9*01 | IGHD6-19*01 | IGHJ4*02 | 16 | 6 | IGKV2-28*01 | IGKJ2*04 | 9 | 0 |
| KY08 | IGHV3-9*01 | IGHD6-19*01 | IGHJ4*02 | 16 | 6 | IGKV2-28*01 | IGKJ2*04 | 9 | 0 |
| KY09 | IGHV3-15*01 | IGHD3-9*01 | IGHJ5*02 | 12 | 4 | IGLV3-1*01 | IGLJ2*01 | 9 | 0 |
| KY10 | IGHV3-15*01 | IGHD3-9*01 | IGHJ5*02 | 12 | 5 | IGLV3-1*01 | IGLJ2*01 | 9 | 0 |
| KY11 | IGHV3-15*01 | IGHD3-9*01 | IGHJ5*02 | 12 | 4 | IGLV3-1*01 | IGLJ2*01 | 9 | 0 |
| KY12 | IGHV3-15*01 | IGHD3-9*01 | IGHJ5*02 | 12 | 4 | IGLV3-1*01 | IGLJ2*01 | 9 | 0 |
| KY13 | IGHV3-11*01 | IGHD3-10*01 | IGHJ4*02 | 14 | 6 | IGKV1D-39*01 | IGKJ2*04 | 9 | 1 |
| KY14 | IGHV3-15*01 | IGHD3-9*01 | IGHJ5*02 | 13 | 6 | IGLV3-1*01 | IGLJ1*01 | 9 | 1 |
| KY15 | IGHV3-15*01 | IGHD3-9*01 | IGHJ5*02 | 13 | 5 | IGLV3-1*01 | IGLJ1*01 | 9 | 0 |
| KY16 | IGHV3-9*01 | IGHD1-14*01 | IGHJ6*02 | 14 | 4 | IGKV2-28*01 | IGKJ4*1 | 9 | 0 |
| KY17 | IGHV3-9*01 | IGHD2-21*02 | IGHJ6*02 | 14 | 5 | IGKV2-28*01 | IGKJ2*04 | 9 | 1 |
| KY18 | IGHV3-9*01 | IGHD2-21*02 | IGHJ6*02 | 14 | 7 | IGKV2-28*01 | IGKJ2*04 | 9 | 0 |
| KY19 | IGHV3-9*01 | IGHD4-17*01 | IGHJ6*02 | 14 | 6 | IGKV2-28*01 | IGKJ4*1 | 9 | 0 |
| KY20 | IGHV3-9*01 | IGHD6-19*01 | IGHJ6*02 | 14 | 3 | IGKV2-28*01 | IGKJ4*1 | 9 | 0 |
| KY21 | IGHV3-11*01 | IGHD3-10*01 | IGHJ6*02 | 14 | 4 | IGKV1-5*03 | IGKJ4*1 | 7 | 0 |
| KY22 | IGHV3-20*d01 | IGHD6-13*01 | IGHJ4*02 | 13 | 4 | IGKV1D-39*01 | IGKJ4*1 | 9 | 1 |
| KY23 | IGHV3-9*01 | IGHD4-23*01 | IGHJ6*02 | 14 | 8 | IGKV2-28*01 | IGKJ4*1 | 9 | 0 |

[2166] The following example describes assays performed to further characterise binding and neutralisation profile of secondary hits, captured in Table 29. Clones were tested in the TIGIT/CD155 HTRF® receptor-ligand assays and analysed by flow cytometry to characterise both binding and neutralisation profile. Confirmation of binding to human and cyno was also performed by HTRF® for KM091-B2 lead clones (data not shown). All mouse binders identified following screening campaigns were re-tested by HTRF®. Finally, SPR was performed for measurement of Kds to human, mouse and cyno TIGIT. These data allowed the selection of a lead panel composed of 23 clones identified from KM091-B2, KM101-B1 or KM101-B2 immunisation campaigns.

TABLE 29
Hits selected following confirmation assays

| | | | Binding | | | |
|---|---|---|---|---|---|---|
| | | TIGIT/ | to mouse | Binding and | Binding | |
| | Clones | CD155 | TIGIT | Neutralisation | to human | |
| Screening | recovered/ | Neutralisation | (HTRF/ | (Flow | TIGIT | Clones |
| campaign | expressed | (HTRF) | FACS) | cytometry) | (SPR) | selected |
| KM091-B1 | 34/25 | Not tested | Not tested | Not tested | 15/25 | 0 |
| KM091-B2 | 10/9 | 9 | 0 | 9 (7 neutralisers) | 9/9 | 9 |
| | | | | (2 increased | | |
| | | | | CD155 binding) | | |
| KM101-B1 | 25/25 | 21 | Not tested | 19 | 19 | 13 |
| KM101-B2 | 37/37 | 37 | 0 | 8 (neutralisers) | 36 | 9 |
| | | | | 5 (increase | | |
| | | | | CD155 binding) | | |
| KM115-B1 | 5/5 | 1 | 5 (HTRF) | 0 | 4 (mouse | 0 |
| | | | 0 (FACS) | | binders) | |
| KM116-B1 | 23 | 10 | Not tested | 10 | 15 | 0 |
| KM127-B1 | 28/28 | Not run | 26 (HTRF) | Not tested | Not tested | 0 |
| | | | 0 (FACS) | | | |

[2167] Clones included in the lead panel are characterised (with one exception) by Kds to human TIGIT below 3 nM, which is the reported affinity for TIGIT/CD155 interaction. In addition, molecules show an equivalent potency to anti-TIGIT benchmark antibody in the HTRF® ligand-receptor assay. Ability of clones to block CD155/TIGIT interaction was also confirmed by flow cytometry which resulted in the identification of neutraliser antibodies but also a sub-group of molecules showing the apparent ability to increase CD155 binding to cells. Summary of binding, neutralisation and affinity profile of the 23 human anti-TIGIT leads is captured in Table 30.

TABLE 30
Lead panel characterisation (1)

| | | | | Neutralisation | Neutralisation |
|---|---|---|---|---|---|
| Clone | Screening | Human KD | Cyno KD | IC50 nM | IC50 nM |
| number | campaign | (nM) | (nM) | (HTRF) | (Cells) |
| KY22 | KM091-B2 | 0.26 | 0.66 | IC minimum | Increased CD155 |
| | | | | CD155 | binding |
| | | | | binding 42.92% | |
| KY23 | KM091-B2 | 2.46 | 14.1 | 4.465 | 0.12 |
| KY21 | KM091-B2 | 0.4 | 4.24 | IC minimum | Increased CD155 |
| | | | | CD155 | binding |
| | | | | binding 15.71% | |
| KY20 | KM101-B1 | 3.34 | 12.7 | 1.41 | 0.21 |
| KY01 | KM101-B1 | 1.71 | 8.78 | 1.961 | IC |
| KY18 | KM101-B1 | 3.99 | 14.2 | 1.888 | 0.31 |
| KY02 | KM101-B1 | 0.17 | 5.38 | 4.427 | 0.09 |
| KY17 | KM101-B1 | 7.11 | 30.6 | 2.085 | 0.31 |
| KY13 | KM101-B1 | 0.18 | 5.9 | 4.228 | 0.13 |
| KY19 | KM101-B1 | 2.27 | 8.71 | 1.935 | 0.093 |
| KY16 | KM101-B1 | 2.22 | 8.4 | 4.941 | 0.43 |
| KY14 | KM101-B1 | 1.38 | 6.75 | 4.528 | 0.19 |
| KY03 | KM101-B1 | 1.71 | 4.36 | 2.402 | 0.29 |
| KY15 | KM101-B1 | 1.58 | 9.53 | 1.824 | 0.28 |
| KY04 | KM101-B1 | 0.59 | 2.42 | 2.907 | 0.19 |
| KY09 | KM101-B2 | 2.35 | 17.7 | 2.222 | 0.86 |
| KY10 | KM101-B2 | 0.57 | 2.64 | 4.289 | 0.56 |
| KY11 | KM101-B2 | 1.89 | 12.1 | 2.271 | 0.84 |
| KY12 | KM101-B2 | 0.86 | 6.95 | 3.026 | 0.99 |
| KY05 | KM101-B2 | 0.49 | 0.23 | IC minimum | Increased CD155 |
| | | | | CD155 | binding |
| | | | | binding 16.85 | |
| KY06 | KM101-B2 | 0.6 | 0.39 | IC minimum | Increased CD155 |
| | | | | CD155 | binding |
| | | | | binding 19.71 | |
| KY07 | KM101-B2 | 0.83 | 0.33 | IC minimum | Increased CD155 |
| | | | | CD155 | binding |
| | | | | binding 16.42 | |
| KY08 | KM101-B2 | 0.81 | 0.43 | IC minimum | Increased CD155 |
| | | | | CD155 | binding |
| | | | | binding 14.77 | |

[2168] Methods

[2169] a) Binding to Human, Mouse and Cyno TIGIT by HTRF®

[2170] Lead anti-TIGIT antibodies, benchmark molecules and isotype antibodies were titrated from 120 nM in HTRF buffer as per 3-fold dilution series for the generation of a 11-point binding curve. These were transferred to a white 384-well, low volume, non-binding surface polystyrene plate (Greiner). In addition, 5 μL of 1 nM or 3 nM anti-TIGIT benchmarks and appropriate isotype antibodies were added to total and non-specific binding wells. 5 μL of 60 nM 647-human (Seq ID No: 539), 20 nM 647-mouse (Seq ID No: 560) or 60 nM 647-cyno TIGIT (Seq ID No: 554) prepared in HTRF assay buffer (PBS (Sigma)+0.53 M KF (Sigma)+0.1% w/v BSA (Sigma)) were added to all wells and incubated for 1 hour at room temperature protected from light. Finally, 10 μL of anti-human Fc cryptate (Cisbio) at 1/100 in HTRF assay buffer was added to whole plates, which were then incubated and protected from light for 3 hours at room temperature. Plates were read using an EnVision plate reader (Perkin Elmer) for measurement of wells at 620 nm and 665 nm emission wavelengths. Data were analysed by calculating 665/620 ratio (Equation 13) and percentage Delta F (Equation 19) for each sample. Non-specific binding was defined using isotype control wells.

$$Calculation of Delta F$$

$$Using 665 \text{/} 485 nm ratio ( see equation 15 )$$

$$Percentage Delta F = \frac{sample value - non \text{-} specific binding}{non \text{-} specific binding} \times 100 \qquad Equation 19$$

[2171] b) TIGIT/CD155 Receptor-Ligand HTRF® Assay

[2172] Anti-TIGIT antibodies, benchmark molecules and isotype control were prepared from 120 nM working concentration in HTRF assay buffer (PBS (Sigma)+0.53 M KF (Sigma)+0.1% w/v BSA (Sigma)) and diluted 1:3, 11 points. On occasions a higher starting concentration of 360-400 nM was used. 5 μL of each titration was transferred to a white 384 well, low-volume, non-binding surface polystyrene plates (Greiner) and mixed with 5 μL of 647-TIGIT (Seq ID No: 539) at 60 nM and 5 μL of Biotin-CD155 at 25 nM (Seq ID No: 575). Following the addition of ligand and receptor solutions, 5 μL of a solution composed of streptavidin K (Cisbio) at 1/100 in HTRF assay buffer was added to whole plate and incubated for 3 hours protected from the light. After incubation, plates were read at 620 nm and 665 nm emission wavelengths using an EnVision plate reader (Perkin Elmer). Total binding wells included biotinylated CD155 and 647-TIGIT, whereas CD155 or 647-TIGIT only was added to negative control wells for measurement of non-specific binding. A CD155 titration curve was also run in parallel with testing of anti-TIGIT antibodies, prepared from 100 nM as per 1:2 dilution curve for 11 concentration points. For each assay, the ligand-receptor EC50 was calculated. Data were analysed by calculating 665/620 ratio (Equation 13) and percentage of CD155 specific binding (Equation 18) for each sample. Data was plotted using a 4-parameter logistic fit enabling determination of IC50 values (Equation 20).

Y=Bottom+(Top−Bottom)/(1+10\hat{ }((Log IC50−X)*HillSlope)) Equation 20: Four Parameter logistic calculation

[2173] X=logarithm of concentration.

[2174] Y=Percentage of CD155 specific binding (equation 18)

[2175] Top and Bottom=Plateaus in same units as Y (specific binding)

[2176] Log IC₅₀ in same units as X. Y starts at Bottom and goes to Top with a sigmoid shape. Percentage of CD155 specific binding decreases as X increases.

[2177] c) Binding and TIGIT/CD155 Ligand-Receptor Assays by Flow Cytometry

[2178] Untransfected or human TIGIT HEK 293 cells (Seq ID No: 543) prepared at 2×10⁶ viable cells/mL in FACS buffer (PBS+1% w/v BSA+0.1% w/v sodium azide) were pre-incubated for 20 minutes with Human Trustain FcX™ (BioLegend) before adding 50 μL to 96-well, v-bottom plates (Greiner). Cells were pelleted following three washing steps and mixed with 25 μL anti-TIGIT antibodies, benchmarks and isotype controls titrated from 300 or 100 nM final assay concentration in FACS buffer using a three-fold series for the generation of a curve composed of 8 or 10 concentration points. Titration curves were transferred to assay plates, as well as positive and negative controls for binding, consisting of benchmark antibodies and relevant isotype controls which concentration was adjusted to 50 nM. Following this transfer, 25 μL of 647-CD155 (Seq ID No: 573) solution prepared at 250 or 80 nM working concentration were added to all wells expect non-specific binding wells used for calculation of percentage of CD155 specific binding. In addition, 25 μL 647-CD155 titrated from 1 μM using a two-fold serial dilution mixed with 25 μL of FACS assay buffer was added to cells to generate a ligand binding curve.

[2179] Cells were incubated with antibodies and CD155 for one hour at 4° C. before being washed as described previously and mixed with 50 μL PE goat-anti-mouse IgG (Jackson ImmunoResearch) diluted 1:500 in FACS buffer. Following a 30-minute incubation at 4° C. in the dark, cells were washed, pelleted and re-suspended in 4% paraformaldehyde (Affymetrix) for 20 minutes. Final washing step removed fixing solution before re-suspension of cells in 100 μL FACS buffer. Flow cytometry was performed using BD FACS Array instrument and FlowJo® to quantify PE/647 geometric mean of each tested sample. Data was analysed by calculating the percentage of CD155 specific binding. Data was plotted using a 4-parameter logistic fit enabling determination of IC₅₀ values (Equation 20) and EC₅₀ values for binding (equation 21).

Y=Bottom+(Top−Bottom)/(1+10\hat{ }((Log EC50−X)*HillSlope)) Equation 21: Four Parameter logistic calculation

[2180] X=logarithm of concentration.

[2181] Y=Geometric mean

[2182] Top and Bottom=Plateaus in same units as Y (Geometric mean)

[2183] Log EC₅₀ in same units as X. Y starts at Bottom and goes to Top with a sigmoid shape. Geometric mean increases as X increases.

[2184] e) Binding to Endogenous TIGIT Expressing Cells

[2185] HH (ATCC® CRL-2105™) and CHO untransfected cells used as negative control for binding were re-suspended at 4×10⁶ cells/ml in FACS buffer (PBS+1% w/v BSA+0.1% w/v sodium azide) and pre-incubated for 20 minutes with Human Trustain FcX™ (BioLegend) to prevent Fc binding of antibodies to cells. 25 μL of cells were added to 96-well, v-bottom plates (Greiner) and mixed with 25 μL/well of anti-TIGIT antibodies, benchmarks and isotype controls at single point concentration of 2 μg/mL in FACS buffer for one hour at 4° C. Wells including unstained cells and cells mixed with secondary antibody only, together with cells treated with isotype control, were used to define unspecific binding. Cells were washed by the addition of 150 μL FACS buffer and pelleted by centrifugation at 300g for 3 minutes. Process was repeated 3 times before adding 50 μL/well PE goat-anti-human IgG (Jackson ImmunoResearch) diluted 1:500 in FACS buffer to designated wells. Following 30-minute incubation at 4° C. in the dark, cells were washed as before, pelleted and re-suspended in 4% paraformaldehyde (Affymetrix) for 20 minutes. Final washing step removed fixing solution before re-suspending cells in 100 μL in FACS buffer. Flow cytometry was performed using CytoFlex and FlowJo® to quantify PE geometric mean of each tested sample. Histogram of each antibody was overlaid with histograms for unstained cells, secondary antibody control wells, reference and isotype control antibodies.

[2186] f) Determination of Affinity by Surface Plasmon Resonance (SPR)

[2187] Methodology run as described in Example 36, no deviations to protocol were introduced.

### Example 38: TIGIT: Identification of Lead Panel (2)

[2188] This example describes the rational for lead selection of 4 top antibodies to be tested in primary functional assays such as an autologous monocyte—T cell assays, mixed lymphocyte reaction (MLR) or T cell killing assays described elsewhere in detail. Selected antibodies are listed in Table 31 and present 1) comparable potency to an anti-human benchmark antibody in the HTRF receptor-ligand assay (FIG. 38) 2) confirmed cell binders with the ability to block recombinant CD155 binding to TIGIT HEK 293 cells (FIG. 39); 3) affinity below reported affinity for TIGIT:CD155 interaction 4) sequence diversity represented by distinct V gene usage. Sequences have been added to sequence listing table: KY01 (Seq ID No: 597-616), KY02 (Seq ID No: 617-636), KY03 (Seq ID No: 637-656) and KY04 (Seq ID No: 657-676).

### INCORPORATION BY REFERENCE

[2189] All references cited herein, including patents, patent applications, papers, text books and the like, and the references cited therein, to the extent that they are not already, are hereby incorporated herein by reference in their entirety.

### EQUIVALENTS

[2190] The foregoing written specification is considered to be sufficient to enable one skilled in the art to practice the invention. The foregoing description and Examples detail certain preferred embodiments of the invention. It will be appreciated, however, that the invention may be practiced in many ways and the invention should be construed in accordance with the appended claims and any equivalents thereof.

[2191] It will be understood that particular configurations, aspects, examples, clauses and embodiments described herein are shown by way of illustration and not as limitations of the invention. Any part of this disclosure may be read in combination with any other part of the disclosure, unless otherwise apparent from the context.

TABLE 31
Lead panel (2)

| | | | TIGIT/CD155 | TIGIT/CD155 |
|---|---|---|---|---|
| | | | receptor- | receptor- |
| Clone | Human | Cyno | ligand assay | ligand assay |
| number | Kd (nM) | KD (nM) | IC50 nM (HTRF) | IC50 nM (Cells) |
| KY01 | 1.71 | 8.78 | 2 | IC |
| KY02 | 0.17 | 5.38 | 4.2 | 0.09 |
| KY03 | 1.71 | 4.4 | 2.4 | 0.29 |
| KY04 | 0.59 | 2.42 | 2.9 | 0.19 |

SEQUENCE LISTING

| SEQ | | | | |
|---|---|---|---|---|
| ID | | | | |
| NO: | Name | | Description | Sequence |
| 1 | Human PD-L1 | | NCBI number: NP_054862.1 | MRIFAVFIFMTYWHLLNAFTVTVPKDLYVVEYGSNMTIECKFPVEKQLDLAA |
| | | | (ECD highlighted in BOLD, | LIVYWEMEDKNIIQFVHGEEDLKVQHSSYRQRARLLKDQLSLGNAALQI |
| | | | cytoplasmic domain underlined) | TDVKLQDAGVYRCMISYGGADYKRITVKVNAPYNKINQRILVVDPVTSE |
| | | | | HELTCQAEGYPKAEVIWTSSDHQVLSGKTTTTNSKREEKLFNVISTLRIN |
| | | | | TTTNEIFYCTFRRLDPEENHTAELVIPELPLAHPPNERTHLVILGAILLCLGVA |
| | | | | LTFIFRLRKGRMMDVKKCGIQDTNSKKQSDTHLEET |
| 2 | Cyno PD-L1 | | NCBI number: XP_014973154.1 | MGWSCIILFLVATATGVHSMFTVTVPKDLYVVEYGSNMTIECKFPVEKQLDL |
| | | | (ECD highlighted in BOLD) | TSLIVYWEMEDKNIIQFVHGEEDLKVQHSNYRQRAQLLKDQLSLGNAAL |
| | | | | RITDVKLQDAGVYRCMISYGGADYKRITVKVNAPYNKINQRILVVDPVT |
| | | | | SEHELTCQAEGYPKAEVIWTSSDHQVLSGKTTTTNSKREEKLLNVTSTLR |
| | | | | INTTANEIFYCIFRRLDPEENHTAELVIPELPLALPPNERT |
| 3 | Human PD-L1 His | | Human PD-L1 ECD with C- | MRIFAVFIFMTYWHLLNAFTVTVPKDLYVVEYGSNMTIECKFPVEKQLDLAALIVYW |
| | | | terminal His tag | EMEDKNIIQFVHGEEDLKVQHSSYRQRARLLKDQLSLGNAALQITDVKLQDAGVYR |
| | | | | CMISYGGADYKRITVKVNAPYNKINQRILVVDPVTSEHELTCQAEGYPKAEVIWTSS |
| | | | | DHQVLSGKTTTTNSKREEKLFNVTSTLRINTTTNEIFYCTFRRLDPEENHTAELVIPE |
| | | | | LPLAHPPNERTHHHHHH |
| 4 | Human PD-L1 Fc | | Human PD-L1 ECD with C-term | MRIFAVFIFMTYWHLLNAFTVTVPKDLYVVEYGSNMTIECKFPVEKQLDLAALIVYW |
| | | | Fc fusion (in bold) | EMEDKNIIQFVHGEEDLKVQHSSYRQRARLLKDQLSLGNAALQITDVKLQDAGVYR |
| | | | | CMISYGGADYKRITVKVNAPYNKINQRILVVDPVTSEHELTCQAEGYPKAEVIWTSS |
| | | | | DHQVLSGKITTINSKREEKLFNVTSTLRINTTTNEIFYCTFRRLDPEENHTAELVIPE |
| | | | | LPLAHPPNERTIEGREPKSCDKTHTCPPCPAPELLGGPSVFLFPPKPKDTLM |
| | | | | ISRTPEVTCVVVDVSHEDPEVKFNWYVDGVEVHNAKTKPREEQYNSTYR |
| | | | | VVSVLTVLHQDWLNGKEYKCKVSNKALPAPIEKTISKAKGQPREPQVYT |
| | | | | LPPSRDELTKNQVSLTCLVKGFYPSDIAVEWESNGQPENNYKTTPPVLD |
| | | | | SDGSFFLYSKLTVDKSRWQQGNVFSCSVMHEALHNHYTQKSLSLSPGK |
| 5 | Cyno PD-L1 FLAG | | Cynomolgus PD-L1 ECD with N- | MGWSCIILFLVATATGVHSMFTVTVPKDLYVVEYGSNMTIECKFPVEKQLDLTSLIV |
| | | | term FLAG tag | YWEMEDKNIIQFVHGEEDLKVQHSNYRQRAQLLKDQLSLGNAALRITDVKLQDAG |
| | | | | VYRCMISYGGADYKRITVKVNAPYNKINQRILVVDPVTSEHELTCQAEGYPKAEVI |
| | | | | WTSSDHQVLSGKTTTTNSKREEKLLNVTSTLRINTTANEIFYCIFRRLDPEENHTAE |
| | | | | LVIPELPLALPPNERTDYKDDDDK |
| 6 | Human PD-1 Fc | | Human PD-1 full length sequence | MGWSCIILFLVATATGVHSLDSPDRPWNPPTFSPALLVVTEGDNATFTCSFSNTSE |
| | | | derived from cDNA as human Fc | SFVLNWYRMSPSNQTDKLAAFPEDRSQPGQDCRFRVTQLPNGRDFHMSVVRARR |
| | | | fusion | NDSGTYLCGAISLAPKAQIKESLRAELRVTERRAEVPTAHPSPSPRPAGQKLENLY |
| | | | | FQGIEGRMDEPKSCDKTHTCPPCPAPELLGGPSVFLFPPKPKDTLMISRT |
| | | | | PEVTCVVVDVSHEDPEVKFNWYVDGVEVHNAKTKPREEQYNSTYRVVS |
| | | | | VLTVLHQDWLNGKEYKCKVSNKALPAPIEKTISKAKGQPREPQVYTLPP |
| | | | | SRDELTKNQVSLTCLVKGFYPSDIAVEWESNGQPENNYKTIPPVLDSDG |
| | | | | SFFLYSKLTVDKSRWQQGNVFSCSVMHEALHNHYTQKSLSLSP |
| 7 | 84G09-CDRH1 | | Amino acid sequence of CDRH1 | GFTFDDYA |
| | (IMGT) | | of 84G09 using IMGT | |
| 8 | 84G09-CDRH2 | | Amino acid sequence of CDRH2 | ISWKSNII |
| | (IMGT) | | of 84G09 using IMGT | |
| 9 | 84G09-CDRH3 | | Amino acid sequence of CDRH3 | ARDITGSGSYGWFDP |
| | (IMGT) | | of 84G09 using IMGT | |
| 10 | 84G09-CDRH1 | | Amino acid sequence of CDRH1 | DYAMH |
| | (Kabat) | | of 84G09 using Kabat | |
| 11 | 84G09-CDRH2 | | Amino acid sequence of CDRH2 | GISWKSNIIGYADSVKG |
| | (Kabat) | | of 84G09 using Kabat | |
| 12 | 84G09-CDRH3 | | Amino acid sequence of CDRH3 | DITGSGSYGWFDP |
| | (Kabat) | | of 84G09 using Kabat | |
| 13 | 84G09-Heavy chain | | Amino acid sequence of V_{H} of | EVQLVESGGGLVQPGRSLRLSCAASGFTFDDYAMHWVRQTPGKGLEWVSGISWK |
| | variable region | | 84G09 (mutations from germline | SNIIGYADSVKGRFTISRDNAKNSLYLQMNSLRAEDTALYYCARDITGSGSYGWFD |
| | | | are shown in bold letters) | PWGQGTLVTVSS |
| 14 | 84G09-Heavy chain | | Nucleic acid sequence of V_{H} of | CAaGAAAAAGCTTGCCGCCACCATGGAGTTTGGGCTGAGCTGGATTTTCCTTTT |
| | variable region | | 84G09 | GGCTATTTTAAAAGGTGTCCAGTGTGAAGTACAATTGGTGGAGTCCGGGGGAG |
| | | | | GCTTGGTACAGCCTGGCAGGTCCCTGAGACTCTCCTGTGCAGCCTCTGGATTCA |
| | | | | CCTTTGATGATTATGCCATGCACTGGGTCCGACAAACTCCAGGGAAGGGCCTGG |
| | | | | AGTGGGTCTCAGGTATAAGTTGGAAGAGTAATATCATAGGCTATGCGGACTCTG |
| | | | | TGAAGGGCCGATTCACCATCTCCAGAGACAACGCCAAGAACTCCCTGTATCTGC |
| | | | | AAATGAACAGTCTGAGAGCTGAGGACACGGCCTTGTATTATTGTGCAAGAGATA |
| | | | | TAACGGGTTCGGGGAGTTATGGCTGGTTCGACCCCTGGGGCCAGGGAACCCTG |
| | | | | GTCACCGTCTCCTCAGCCAAAACGACACCCCCATCTGTCTATCCACTGGCCCCTG |
| | | | | AATCTGCTAAAACTCAGCCTCCG |
| 15 | 84G09-full heavy | | Amino acid sequence of 84G09 | EVQLVESGGGLVQPGRSLRLSCAASGFTFDDYAMHWVRQTPGKGLEWVSGISWK |
| | chain sequence | | heavy chain (mutations from | SNIIGYADSVKGRFTISRDNAKNSLYLQMNSLRAEDTALYYCARDITGSGSYGWFD |
| | | | germline are shown in bold | PWGQGTLVTVSSASTKGPSVFPLAPCSRSTSESTAALGCLVKDYFPEPVTVSWNSG |
| | | | letters) | ALTSGVHTFPAVLQSSGLYSLSSVVTVPSSSLGTKTYTCNVDHKPSNTKVDKRVESK |
| | | | | YGPPCPPCPAPEFEGGPSVFLFPPKPKDTLMISRTPEVTCVVVDVSQEDPEVQFNW |
| | | | | YVDGVEVHNAKTKPREEQFNSTYRVVSVLTVLHQDWLNGKEYKCKVSNKGLPSSIE |
| | | | | KTISKAKGQPREPQVYTLPPSQEEMTKNQVSLTCLVKGFYPSDIAVEWESNGQPEN |
| | | | | NYKTTPPVLDSDGSFFLYSRLTVDKSRWQEGNVFSCSVMHEALHNHYTQKSLSLSL |
| | | | | GK |
| 16 | 84G09-full heavy | | Nucleic acid sequence of 84G09 | GAAGTGCAGCTGGTGGAATCTGGCGGCGGACTGGTGCAGCCTGGCAGATCCCT |
| | chain sequence | | heavy chain | GAGACTGTCTTGTGCCGCCTCCGGCTTCACCTTCGACGACTACGCTATGCACTG |
| | | | | GGTGCGACAGACCCCTGGCAAGGGCCTGGAATGGGTGTCCGGCATCTCCTGGA |
| | | | | AGTCCAACATCATCGGCTACGCCGACTCCGTGAAGGGCCGGTTCACCATCTCCC |
| | | | | GGGACAACGCCAAGAACTCCCTGTACCTGCAGATGAACAGCCTGCGGGCCGAGG |
| | | | | ACACCGCCCTGTACTACTGCGCCAGAGACATCACCGGCTCCGGCTCCTACGGAT |
| | | | | GGTTCGATCCTTGGGGCCAGGGCACCCTCGTGACCGTGTCCTCTGCCAGCACCA |
| | | | | AGGGCCCCTCTGTGTTCCCTCTGGCCCCTTCCAGCAAGTCCACCTCTGGCGGAA |
| | | | | CAGCCGCTCTGGGCTGCCTCGTGAAGGACTACTTCCCCGAGCCTGTGACCGTGT |
| | | | | CCTGGAACTCTGGCGCTCTGACCAGCGGAGTGCACACCTTCCCTGCTGTGCTGC |
| | | | | AGTCCTCCGGCCTGTACTCCCTGTCCTCCGTCGTGACCGTGCCTTCCAGCTCTCT |
| | | | | GGGCACCCAGACCTACATCTGCAACGTGAACCACAAGCCCTCCAACACCAAGGT |
| | | | | GGACAAGAAGGTGGAACCCAAGTCCTGCGACAAGACCCACACCTGTCCCCCTTG |
| | | | | TCCTGCCCCTGAACTGCTGGGCGGACCTTCCGTGTTCCTGTTCCCCCCAAAGCC |
| | | | | CAAGGACACCCTGATGATCTCCCGGACCCCCGAAGTGACCTGCGTGGTGGTGGA |
| | | | | TGTGTCCCACGAGGACCCTGAAGTGAAGTTCAATTGGTACGTGGACGGCGTGGA |
| | | | | AGTGCACAACGCCAAGACCAAGCCTAGAGAGGAACAGTACAACTCCACCTACCG |
| | | | | GGTGGTGTCCGTGCTGACCGTGCTGCACCAGGATTGGCTGAACGGCAAAGAGT |
| | | | | ACAAGTGCAAGGTGTCCAACAAGGCCCTGCCTGCCCCCATCGAAAAGACCATCT |
| | | | | CCAAGGCCAAGGGCCAGCCCCGGGAACCCCAGGTGTACACACTGCCCCCTAGCA |
| | | | | GGGACGAGCTGACCAAGAACCAGGTGTCCCTGACCTGTCTCGTGAAAGGCTTCT |
| | | | | ACCCCTCCGATATCGCCGTGGAATGGGAGTCCAACGGCCAGCCTGAGAACAACT |
| | | | | ACAAGACCACCCCCCCTGTGCTGGACTCCGACGGCTCATTCTTCCTGTACAGCAA |
| | | | | GCTGACAGTGGACAAGTCCCGGTGGCAGCAGGGCAACGTGTTCTCCTGCTCCGT |
| | | | | GATGCACGAGGCCCTGCACAACCACTACACCCAGAAGTCCCTGTCCCTGAGCCC |
| | | | | CGGCAAG |
| 17 | 84G09-CDRL1 | | Amino acid sequence of CDRL1 | QSISSY |
| | (IMGT) | | of 84G09 using IMGT | |
| 18 | 84G09-CDRL2 | | Amino acid sequence of CDRL2 | VAS |
| | (IMGT) | | of 84G09 using IMGT | |
| 19 | 84G09-CDRL3 | | Amino acid sequence of CDRL3 | QQSYSNPIT |
| | (IMGT) | | of 84G09 using IMGT | |
| 20 | 84G09-CDRL1 | | Amino acid sequence of CDRL1 | RASQSISSYLN |
| | (Kabat) | | of 84G09 using Kabat | |
| 21 | 84G09-CDRL2 | | Amino acid sequence of CDRL2 | VASSLQS |
| | (Kabat) | | of 84G09 using Kabat | |
| 22 | 84G09-CDRL3 | | Amino acid sequence of CDRL3 | QQSYSNPIT |
| | (Kabat) | | of 84G09 using Kabat | |
| 23 | 84G09-Light chain | | Amino acid sequence of V_{L} of | DIQMTQSPSSLSASVGDRVTITCRASQSISSYLNWYQQKPGKAPKPLIYVASSLQS |
| | variable region | | 84G09 | GVPSSFSGSGSGTDFTLTISSLQPEDFATYYCQQSYSNPITFGQGTRLEIK |
| 24 | 84G09-Light chain | | Nucleic acid sequence of V_{L} of | GACATCCAGATGACCCAGTCTCCATCCTCCCTGTCTGCATCTGTAGGAGACAGA |
| | variable region | | 84G09 | GTCACCATCACTTGCCGGGCAAGTCAGAGCATTAGCAGCTATTTAAATTGGTAT |
| | | | | CAGCAGAAACCAGGGAAAGCCCCTAAGCCCCTGATCTATGTTGCATCCAGTTTG |
| | | | | CAAAGTGGGGTCCCATCAAGTTTCAGTGGCAGTGGATCTGGGACAGATTTCACT |
| | | | | CTCACCATCAGCAGTCTGCAACCTGAAGATTTTGCAACTTACTACTGTCAACAGA |
| | | | | GTTACAGTAATCCGATCACCTTCGGCCAAGGGACACGACTGGAGATCAAA |
| 25 | 84G09-full light chain | | Amino acid sequence of 84G09 | DIQMTQSPSSLSASVGDRVTITCRASQSISSYLNWYQQKPGKAPKPLIYVASSLQS |
| | sequence | | light chain | GVPSSFSGSGSGTDFTLTISSLQPEDFATYYCQQSYSNPITFGQGTRLEIKRTVAAP |
| | | | | SVFIFPPSDEQLKSGTASVVCLLNNFYPREAKVQWKVDNALQSGNSQESVTEQDSK |
| | | | | DSTYSLSSTLTLSKADYEKHKVYACEVTHQGLSSPVTKSFNRGEC |
| 26 | 84G09-full light chain | | Nucleic acid sequence of 84G09 | GACATCCAGATGACCCAGTCTCCATCCTCCCTGTCTGCATCTGTAGGAGACAGA |
| | sequence | | light chain | GTCACCATCACTTGCCGGGCAAGTCAGAGCATTAGCAGCTATTTAAATTGGTAT |
| | | | | CAGCAGAAACCAGGGAAAGCCCCTAAGCCCCTGATCTATGTTGCATCCAGTTTG |
| | | | | CAAAGTGGGGTCCCATCAAGTTTCAGTGGCAGTGGATCTGGGACAGATTTCACT |
| | | | | CTCACCATCAGCAGTCTGCAACCTGAAGATTTTGCAACTTACTACTGTCAACAGA |
| | | | | GTTACAGTAATCCGATCACCTTCGGCCAAGGGACACGACTGGAGATCAAACGTA |
| | | | | CGGTGGCCGCTCCCTCCGTGTTCATCTTCCCACCTTCCGACGAGCAGCTGAAGT |
| | | | | CCGGCACCGCTTCTGTCGTGTGCCTGCTGAACAACTTCTACCCCCGCGAGGCCA |
| | | | | AGGTGCAGTGGAAGGTGGACAACGCCCTGCAGTCCGGCAACTCCCAGGAATCCG |
| | | | | TGACCGAGCAGGACTCCAAGGACAGCACCTACTCCCTGTCCTCCACCCTGACCC |
| | | | | TGTCCAAGGCCGACTACGAGAAGCACAAGGTGTACGCCTGCGAAGTGACCCACC |
| | | | | AGGGCCTGTCTAGCCCCGTGACCAAGTCTTTCAACCGGGGCGAGTGT |
| 27 | 1D05-CDRH1 (IMGT) | | Amino acid sequence of CDRH1 | GFTFDDYA |
| | | | of 1D05 using IMGT | |
| 28 | 1D05-CDRH2 (IMGT) | | Amino acid sequence of CDRH2 | ISWIRTGI |
| | | | of 1D05 using IMGT | |
| 29 | 1D05-CDRH3 (IMGT) | | Amino acid sequence of CDRH3 | AKDMKGSGTYGGWFDT |
| | | | of 1D05 using IMGT | |
| 30 | 1D05-CDRH1 (Kabat) | | Amino acid sequence of CDRH1 | DYAMH |
| | | | of 1D05 using Kabat | |
| 31 | 1D05-CDRH2 (Kabat) | | Amino acid sequence of CDRH2 | GISWIRTGIGYADSVKG |
| | | | of 1D05 using Kabat | |
| 32 | 1D05-CDRH3 (Kabat) | | Amino acid sequence of CDRH3 | DMKGSGTYGGWFDT |
| | | | of 1D05 using Kabat | |
| 33 | 1D05-Heavy chain | | Amino acid sequence of V_{H} of | EVQLVESGGGLVQPGRSLRLSCAASGFTFDDYAMHWVRQVPGKGLEWVSGISWI |
| | variable region | | 1D05 (mutations from germline | RTGIGYADSVKGRFTIFRDNAKNSLYLQMNSLRAEDTALYYCAKDMKGSGTYGG |
| | | | are shown in bold letters) | WFDTWGQGTLVTVSS |
| 34 | 1D05-Heavy chain | | Nucleic acid sequence of V_{H} of | AAGCTTGCCGCCACCATGGAGTTTGGGCTGAGCTGGATTTTCCTTTTGGCTATT |
| | variable region | | 1D05 | TTAAAAGGTGTCCAGTGTGAAGTGCAGCTGGTGGAGTCTGGGGGAGGCTTGGT |
| | | | | GCAGCCTGGCAGGTCCCTGAGACTCTCCIGTGCAGCCTCTGGATTCACCTTTGA |
| | | | | TGATTATGCCATGCACTGGGTCCGGCAAGTTCCAGGGAAGGGCCTGGAATGGG |
| | | | | TCTCAGGCATTAGTTGGATTCGTACTGGCATAGGCTATGCGGACTCTGTGAAGG |
| | | | | GCCGATTCACCATTTTCAGAGACAACGCCAAGAATTCCCTGTATCTGCAAATGAA |
| | | | | CAGTCTGAGAGCTGAGGACACGGCCTTGTATTACTGTGCAAAAGATATGAAGGG |
| | | | | TTCGGGGACTTATGGGGGGTGGTTCGACACCTGGGGCCAGGGAACCCTGGTCA |
| | | | | CCGTCTCCTCAGCCAAAACAACAGCCCCATCGGTCTATCCACTGGCCCCTGC |
| 35 | 1D05-full heavy chain | | Amino acid sequence of 1D05 | EVQLVESGGGLVQPGRSLRLSCAASGFTFDDYAMHWVRQVPGKGLEWVSGISWI |
| | sequence | | heavy chain | RTGIGYADSVKGRFTIFRDNAKNSLYLQMNSLRAEDTALYYCAKDMKGSGTYGGW |
| | | | | FDTINGQGTLVTVSSASTKGPSVFPLAPCSRSTSESTAALGCLVKDYFPEPVTVSWN |
| | | | | SGALTSGVHTFPAVLQSSGLYSLSSVVTVPSSSLGTKTYTCNVDHKPSNTKVDKRV |
| | | | | ESKYGPPCPPCPAPEFEGGPSVFLFPPKPKDTLMISRTPEVTCVVVDVSQEDPEVQF |
| | | | | NWYVDGVEVHNAKTKPREEQFNSTYRVVSVLTVLHQDWLNGKEYKCKVSNKGLP |
| | | | | SSIEKTISKAKGQPREPQVYTLPPSQEEMTKNQVSLTCLVKGFYPSDIAVEWESNG |
| | | | | QPENNYKTTPPVLDSDGSFFLYSRLTVDKSRWQEGNVFSCSVMHEALHNHYTQKS |
| | | | | LSLSLGK |
| 36 | 1D05-full heavy chain | | Nucleic acid sequence of 1D05 | GAAGTGCAGCTGGTGGAATCTGGCGGCGGACTGGTGCAGCCTGGCAGATCCCT |
| | sequence | | heavy chain | GAGACTGTCTTGTGCCGCCTCCGGCTTCACCTTCGACGACTACGCTATGCACTG |
| | | | | GGTGCGACAGGTGCCAGGCAAGGGCCTGGAATGGGTGTCCGGCATCTCTTGGA |
| | | | | TCCGGACCGGCATCGGCTACGCCGACTCTGTGAAGGGCCGGTTCACCATCTTCC |
| | | | | GGGACAACGCCAAGAACTCCCTGTACCTGCAGATGAACAGCCTGCGGGCCGAGG |
| | | | | ACACCGCCCTGTACTACTGCGCCAAGGACATGAAGGGCTCCGGCACCTACGGCG |
| | | | | GATGGTTCGATACTTGGGGCCAGGGCACCCTCGTGACCGTGTCCTCTGCCAGCA |
| | | | | CCAAGGGCCCCTCTGTGTTCCCTCTGGCCCCTTCCAGCAAGTCCACCTCTGGCG |
| | | | | GAACAGCCGCTCTGGGCTGCCTCGTGAAGGACTACTTCCCCGAGCCTGTGACCG |
| | | | | TGTCCTGGAACTCTGGCGCTCTGACCAGCGGAGTGCACACCTTCCCTGCTGTGC |
| | | | | TGCAGTCCTCCGGCCTGTACTCCCTGTCCTCCGTCGTGACCGTGCCTTCCAGCT |
| | | | | CTCTGGGCACCCAGACCTACATCTGCAACGTGAACCACAAGCCCTCCAACACCAA |
| | | | | GGTGGACAAGAAGGTGGAACCCAAGTCCTGCGACAAGACCCACACCTGTCCCCC |
| | | | | TTGTCCTGCCCCTGAACTGCTGGGCGGACCTTCCGTGTTCCTGTTCCCCCCAAA |
| | | | | GCCCAAGGACACCCTGATGATCTCCCGGACCCCCGAAGTGACCTGCGTGGTGGT |
| | | | | GGATGTGTCCCACGAGGACCCTGAAGTGAAGTTCAATTGGTACGTGGACGGCGT |
| | | | | GGAAGTGCACAACGCCAAGACCAAGCCTAGAGAGGAACAGTACAACTCCACCTA |
| | | | | CCGGGTGGTGTCCGTGCTGACCGTGCTGCACCAGGATTGGCTGAACGGCAAAG |
| | | | | AGTACAAGTGCAAGGTGTCCAACAAGGCCCTGCCTGCCCCCATCGAAAAGACCA |
| | | | | TCTCCAAGGCCAAGGGCCAGCCCCGGGAACCCCAGGTGTACACACTGCCCCCTA |
| | | | | GCAGGGACGAGCTGACCAAGAACCAGGTGTCCCTGACCTGTCTCGTGAAAGGCT |
| | | | | TCTACCCCTCCGATATCGCCGTGGAATGGGAGTCCAACGGCCAGCCTGAGAACA |
| | | | | ACTACAAGACCACCCCCCCTGTGCTGGACTCCGACGGCTCATTCTTCCTGTACAG |
| | | | | CAAGCTGACAGTGGACAAGTCCCGGTGGCAGCAGGGCAACGTGTTCTCCTGCTC |
| | | | | CGTGATGCACGAGGCCCTGCACAACCACTACACCCAGAAGTCCCTGTCCCTGAG |
| | | | | CCCCGGCAAG |
| 37 | 1D05-CDRL1 (IMGT) | | Amino acid sequence of CDRL1 | QSISSY |
| | | | of 1D05 using IMGT | |
| 38 | 1D05-CDRL2 (IMGT) | | Amino acid sequence of CDRL2 | VAS |
| | | | of 1D05 using IMGT | |
| 39 | 1D05-CDRL3 (IMGT) | | Amino acid sequence of CDRL3 | QQSYSTPIT |
| | | | of 1D05 using IMGT | |
| 40 | 1D05-CDRL1 (Kabat) | | Amino acid sequence of CDRL1 | RASQSISSYLN |
| | | | of 1D05 using Kabat | |
| 41 | 1D05-CDRL2 (Kabat) | | Amino acid sequence of CDRL2 | VASSLQS |
| | | | of 1D05 using Kabat | |
| 42 | 1D05-CDRL3 (Kabat) | | Amino acid sequence of CDRL3 | QQSYSTPIT |
| | | | of 1D05 using Kabat | |
| 43 | 1D05-Light chain | | Amino acid sequence of V_{L} of | DIQMTQSPSSLSASVGDRVTITCRASQSISSYLNWYQQKPGKAPKLLIYVASSLQS |
| | variable region | | 1D05 (mutations from germline | GVPSRFSGSGSGTDFILTISSLQPEDFATYYCQQSYSTPITFGQGTRLEIK |
| | | | are shown in bold letters) | |
| 44 | 1D05-Light chain | | Nucleic acid sequence of V_{L} of | AAAGCTTGCCGCCACCATGAGGCTCCCTGCTCAGCTTCTGGGGCTCCTGCTACT |
| | variable region | | 1D05 | CTGGCTCCGAGGTGCCAGATGTGACATCCAGATGACCCAGTCTCCATCCTCCCT |
| | | | | GTCTGCATCTGTAGGAGACAGAGTCACCATCACTTGCCGGGCAAGTCAGAGCAT |
| | | | | TAGCAGCTATTTAAATTGGTATCAGCAGAAACCAGGGAAAGCCCCTAAACTCCT |
| | | | | GATCTATGTTGCATCCAGTTTGCAAAGTGGGGTCCCATCAAGGTTCAGTGGCAG |
| | | | | TGGATCTGGGACAGATTTCACTCTCACTATCAGCAGTCTGCAACCTGAAGATTTT |
| | | | | GCAACTTACTACTGTCAACAGAGTTACAGTACCCCGATCACCTTCGGCCAAGGG |
| | | | | ACACGTCTGGAGATCAAACGTACGGATGCTGCACCAACT |
| 45 | 1D05-full light chain | | Amino acid sequence of 1D05 | DIQMTQSPSSLSASVGDRVTITCRASQSISSYLNWYQQKPGKAPKLLIYVASSLQS |
| | sequence | | light chain | GVPSRFSGSGSGTDFTLTISSLQPEDFATYYCQQSYSTPITFGQGTRLEIKRTVAAP |
| | | | | SVFIFPPSDEQLKSGTASVVCLLNNFYPREAKVQWKVDNALQSGNSQESVTEQDSK |
| | | | | DSTYSLSSTLTLSKADYEKHKVYACEVTHQGLSSPVTKSFNRGEC |
| 46 | 1D05-full light chain | | Nucleic acid sequence of 1D05 | GACATCCAGATGACCCAGTCCCCCTCCAGCCTGTCTGCTTCCGTGGGCGACAGA |
| | sequence | | light chain | GTGACCATCACCTGTCGGGCCTCCCAGTCCATCTCCTCCTACCTGAACTGGTATC |
| | | | | AGCAGAAGCCCGGCAAGGCCCCCAAGCTGCTGATCTACGTGGCCAGCTCTCTGC |
| | | | | AGTCCGGCGTGCCCTCTAGATTCTCCGGCTCTGGCTCTGGCACCGACTTTACCC |
| | | | | TGACCATCAGCTCCCTGCAGCCCGAGGACTTCGCCACCTACTACTGCCAGCAGT |
| | | | | CCTACTCCACCCCTATCACCTTCGGCCAGGGCACCCGGCTGGAAATCAAACGTA |
| | | | | CGGTGGCCGCTCCCTCCGTGTTCATCTTCCCACCTTCCGACGAGCAGCTGAAGT |
| | | | | CCGGCACCGCTTCTGTCGTGTGCCTGCTGAACAACTTCTACCCCCGCGAGGCCA |
| | | | | AGGTGCAGTGGAAGGTGGACAACGCCCTGCAGTCCGGCAACTCCCAGGAATCCG |
| | | | | TGACCGAGCAGGACTCCAAGGACAGCACCTACTCCCTGTCCTCCACCCTGACCC |
| | | | | TGTCCAAGGCCGACTACGAGAAGCACAAGGTGTACGCCTGCGAAGTGACCCACC |
| | | | | AGGGCCTGTCTAGCCCCGTGACCAAGTCTTTCAACCGGGGCGAGTGT |
| 47 | Mutated 1D05-HC | | Amino acid sequence of 1D05 | EVQLVESGGGLVQPGRSLRLSCAASGFTFDDYAMHWVRQAPGKGLEWVSGISWI |
| | mutant 1 | | heavy chain with V to A back- | RTGIGYADSVKGRFTIFRDNAKNSLYLQMNSLRAEDTALYYCAKDMKGSGTYGGW |
| | | | mutation in framework region to | FDTWGQGTLVTVSSASTKGPSVFPLAPCSRSTSESTAALGCLVKDYFPEPVTVSWN |
| | | | germline highlighted with IgG1 | SGALTSGVHTFPAVLQSSGLYSLSSVVTVPSSSLGTKTYTCNVDHKPSNTKVDKRV |
| | | | disabled (LAGA) constant region | ESKYGPPCPPCPAPELAGAPSVFLFPPKPKDTLMISRTPEVTCVVVDVSQEDPEVQF |
| | | | | NWYVDGVEVHNAKTKPREEQFNSTYRVVSVLTVLHQDWLNGKEYKCKVSNKGLP |
| | | | | SSIEKTISKAKGQPREPQVYTLPPSQEEMTKNQVSLTCLVKGFYPSDIAVEWESNG |
| | | | | QPENNYKTTPPVLDSDGSFFLYSRLTVDKSRWQEGNVFSCSVMHEALHNHYTQKS |
| | | | | LSLSLGK |
| 48 | Mutated 1D05-HC | | Amino acid sequence of 1D05 | EVQLVESGGGLVQPGRSLRLSCAASGFTFDDYAMHVWRQVPGKGLEWVSGISWI |
| | mutant 2 | | heavy chain with F to S back- | RTGIGYADSVKGRFTISRDNAKNSLYLQMNSLRAEDTALYYCAKDMKGSGTYGGW |
| | | | mutation in framework region to | FDTWGQGTLVWSSASTKGPSVFPLAPCSRSTSESTAALGCLVKDYFPEPVTVSWN |
| | | | germline highlighted with IgG1 | SGALTSGVHTFPAVLQSSGLYSLSSVVTVPSSSLGTKTYTCNVDHKPSNTKVDKRV |
| | | | disabled (LAGA) constant region | ESKYGPPCPPCPAPELAGAPSVFLFPPKPKDILMISRTPEVTCVVVDVSQEDPEVQF |
| | | | | NWYVDGVEVHNAKTKPREEQFNSTYRVVSVLTVLHQDWLNGKEYKCINSNKGLP |
| | | | | SSIEKTISKAKGQPREPQVYTLPPSQEEMTKNQVSLTCLVKGFYPSDIAVEWESNG |
| | | | | QPENNYKTTPPVLDSDGSFFLYSRLTVDKSRWQEGNVFSCSVMHEALHNHYTQKS |
| | | | | LSLSLGK |
| 49 | Mutated 1D05-HC | | Amino acid sequence of 1D05 | EVQLVESGGGLVQPGRSLRLSCAASGFTFDDYAMHWVRQVPGKGLEWVSGISWI |
| | mutant 3 | | heavy chain with ELLG to -PVA | RTGIGYADSVKGRFTIFRDNAKNSLYLQMNSLRAEDTALYYCAKDMKGSGTYGGW |
| | | | back-mutation in constant | FDTWGQGTLVTVSSASTKGPSVFPLAPCSRSTSESTAALGCLVKDYFPEPVTVSWN |
| | | | region to germline highlighted | SGALTSGVHTFPAVLQSSGLYSLSSVVTVPSSSLGTKTYTCNVDHKPSNTKVDKRV |
| | | | | ESKYGPPCPPCPAP- |
| | | | | PVAGPSVFLFPPKPKDTLMISRTPEVTCVVVDVSQEDPEVQFNWYVDGVEVHNAK |
| | | | | TKPREEQFNSTYRVVSVLTVLHQDWLNGKEYKCKVSNKGLPSSIEKTISKAKGQPR |
| | | | | EPQVYTLPPSQEEMTKNQVSLTCLVKGFYPSDIAVEWESNGQPENNYKTTPPVLDS |
| | | | | DGSFFLYSRLTVDKSRWQEGNVFSCSVMHEALHNHYTQKSLSLSLGK |
| 50 | Mutated 1D05-LC | | Amino acid sequence of 1D05 | DIQMTQSPSSLSASVGDRVTITCRASQSISSYLNWYQQKPGKAPKLLIYAASSLQS |
| | mutant 1 | | kappa light chain with V to A | GVPSRFSGSGSGTDFTLTISSLQPEDFATYYCQQSYSTPITFGQGTRLEIKRTVAAP |
| | | | back-mutation in CDRL2 to | SVFIFPPSDEQLKSGTASVVCLLNNFYPREAKVQWKVDNALQSGNSQESVTEQDSK |
| | | | germline highlighted | DSTYSLSSTLTLSKADYEKHKVYACEVTHQGLSSPVTKSFNRGEC |
| 51 | Mutated 1D05-LC | | Amino acid sequence of 1D05 | DIQMTQSPSSLSASVGDRVTITCRASQSISSYLNWYQQKPGKAPKLFIYVASSLQS |
| | mutant 2 | | kappa light chain with L to F | GVPSRFSGSGSGTDFILTISSLQPEDFATYYCQQSYSTPITFGQGTRLEIKRTVAAP |
| | | | back-mutation in framework to | SVFIFPPSDEQLKSGTASVVCLLNNFYPREAKVQWKVDNALQSGNSQESVTEQDSK |
| | | | germline highlighted | DSTYSLSSTLTLSKADYEKHKVYACEVTHQGLSSPVTKSFNRGEC |
| 52 | 411B08-CDRH1 | | Amino acid sequence of CDRH1 | GFTFSSYW |
| | (IMGT) | | of 411B08 using IMGT | |
| 53 | 411B08-CDRH2 | | Amino acid sequence of CDRH2 | IKEDGSEK |
| | (IMGT) | | of 411B08 using IMGT | |
| 54 | 411B08-CDRH3 | | Amino acid sequence of CDRH3 | ARNRLYSDFLDN |
| | (IMGT) | | of 411B08 using IMGT | |
| 55 | 411B08-CDRH1 | | Amino acid sequence of CDRH1 | SYWMS |
| | (Kabat) | | of 411B08 using Kabat | |
| 56 | 411B08-CDRH2 | | Amino acid sequence of CDRH2 | NIKEDGSEKYYVDSVKG |
| | (Kabat) | | of 411B08 using Kabat | |
| 57 | 411B08-CDRH3 | | Amino acid sequence of CDRH3 | NRLYSDFLDN |
| | (Kabat) | | of 411B08 using Kabat | |
| 58 | 411B08-Heavy chain | | Amino acid sequence of V_{H} of | EVQLVESGGGLVQPGGSLRLSCAASGFTESSYWMSWVRQAPGKGLEWVANIKED |
| | variable region | | 411B08 | GSEKYYVDSVKGRFTISRDNAKNSLYLQMNSLRAEDTSVYYCARNRLYSDFLDNW |
| | | | | GQGTLVTVSS |
| 59 | 411B08-Heavy chain | | Nucleic acid sequence of V_{H} of | GAGGTGCAGCTGGTGGAGTCTGGGGGAGGCTTGGTCCAGCCTGGGGGGTCCCT |
| | variable region | | 411B08 | GAGACTCTCCTGTGCAGCCTCTGGATTCACGTTTAGTAGCTATTGGATGAGTTG |
| | | | | GGTCCGCCAGGCTCCAGGGAAGGGGCTGGAGTGGGTGGCCAACATCAAAGAAG |
| | | | | ATGGAAGTGAGAAATACTATGTCGACTCTGTGAAGGGCCGATTCACCATCTCCA |
| | | | | GAGACAACGCCAAGAACTCACTGTATCTGCAAATGAACAGCCTGAGAGCCGAGG |
| | | | | ACACGTCTGTGTATTACTGTGCGAGAAATCGACTCTACAGTGACTTCCTTGACAA |
| | | | | CTGGGGCCAGGGAACCCTGGTCACCGTCTCCTCAG |
| 60 | 411B08-full heavy | | Amino acid sequence of 411B08 | EVQLVESGGGLVQPGGSLRLSCAASGFTFSSYWMSWVRQAPGKGLEVINANIKED |
| | chain sequence | | heavy chain | GSEKYYVDSVKGRFTISRDNAKNSLYLQMNSLRAEDTSVYYCARNRLYSDFLDNW |
| | | | | GQGTLVTVSSASTKGPSVFPLAPSSKSTSGGTAALGCLVKDYFPEPVTVSWNSGAL |
| | | | | TSGVHTFPAVLQSSGLYSLSSVVTVPSSSLGTQTYICNVNHKPSNTKVDKKVEPKSC |
| | | | | DKTHTCPPCPAPELLGGPSVFLFPPKPKDTLMISRTPEVTCVVVDVSHEDPEVKFN |
| | | | | WYVDGVEVHNAKTKPREEQYNSTYRVVSVLTVLHQDWLNGKEYKCKVSNKALPAP |
| | | | | IEKTISKAKGQPREPQVYTLPPSRDELTKNQVSLTCLVKGFYPSDIAVEWESNGQPE |
| | | | | NNYKTTPPVLDSDGSFFLYSKLTVDKSRWQQGNVFSCSVMHEALHNHYTQKSLSL |
| | | | | SPGK |
| 61 | 411B08-full heavy | | Nucleic acid sequence of 411B08 | GAGGTGCAGCTGGTGGAGTCTGGGGGAGGCTTGGTCCAGCCTGGGGGGTCCCT |
| | chain sequence | | heavy chain | GAGACTCTCCTGTGCAGCCTCTGGATTCACGTTTAGTAGCTATTGGATGAGTTG |
| | | | | GGTCCGCCAGGCTCCAGGGAAGGGGCTGGAGTGGGTGGCCAACATCAAAGAAG |
| | | | | ATGGAAGTGAGAAATACTATGTCGACTCTGTGAAGGGCCGATTCACCATCTCCA |
| | | | | GAGACAACGCCAAGAACTCACTGTATCTGCAAATGAACAGCCTGAGAGCCGAGG |
| | | | | ACACGTCTGTGTATTACTGTGCGAGAAATCGACTCTACAGTGACTTCCTTGACAA |
| | | | | CTGGGGCCAGGGAACCCTGGTCACCGTCTCCTCAGCCAGCACCAAGGGCCCCTC |
| | | | | TGTGTTCCCTCTGGCCCCTTCCAGCAAGTCCACCTCTGGCGGAACAGCCGCTCT |
| | | | | GGGCTGCCTCGTGAAGGACTACTTCCCCGAGCCTGTGACCGTGTCCTGGAACTC |
| | | | | TGGCGCTCTGACCAGCGGAGTGCACACCTTCCCTGCTGTGCTGCAGTCCTCCGG |
| | | | | CCTGTACTCCCTGTCCTCCGTCGTGACCGTGCCTTCCAGCTCTCTGGGCACCCA |
| | | | | GACCTACATCTGCAACGTGAACCACAAGCCCTCCAACACCAAGGTGGACAAGAA |
| | | | | GGTGGAACCCAAGTCCTGCGACAAGACCCACACCTGTCCCCCTTGTCCTGCCCC |
| | | | | TGAACTGCTGGGCGGACCTTCCGTGTTCCTGTTCCCCCCAAAGCCCAAGGACAC |
| | | | | CCTGATGATCTCCCGGACCCCCGAAGTGACCTGCGTGGTGGTGGATGTGTCCCA |
| | | | | CGAGGACCCTGAAGTGAAGTTCAATTGGTACGTGGACGGCGTGGAAGTGCACAA |
| | | | | CGCCAAGACCAAGCCTAGAGAGGAACAGTACAACTCCACCTACCGGGTGGTGTC |
| | | | | CGTGCTGACCGTGCTGCACCAGGATTGGCTGAACGGCAAAGAGTACAAGTGCAA |
| | | | | GGTGTCCAACAAGGCCCTGCCTGCCCCCATCGAAAAGACCATCTCCAAGGCCAA |
| | | | | GGGCCAGCCCCGGGAACCCCAGGTGTACACACTGCCCCCTAGCAGGGACGAGCT |
| | | | | GACCAAGAACCAGGTGTCCCTGACCTGTCTCGTGAAAGGCTTCTACCCCTCCGA |
| | | | | TATCGCCGTGGAATGGGAGTCCAACGGCCAGCCTGAGAACAACTACAAGACCAC |
| | | | | CCCCCCTGTGCTGGACTCCGACGGCTCATTCTTCCTGTACAGCAAGCTGACAGT |
| | | | | GGACAAGTCCCGGTGGCAGCAGGGCAACGTGTTCTCCTGCTCCGTGATGCACGA |
| | | | | GGCCCTGCACAACCACTACACCCAGAAGTCCCTGTCCCTGAGCCCCGGCAAG |
| 62 | 411B08-CDRL1 | | Amino acid sequence of CDRL1 | QGVSSW |
| | (IMGT) | | of 411B08 using IMGT | |
| 63 | 411B08-CDRL2 | | Amino acid sequence of CDRL2 | GAS |
| | (IMGT) | | of 411B08 using IMGT | |
| 64 | 411B08-CDRL3 | | Amino acid sequence of CDRL3 | QQANSIPFT |
| | (IMGT) | | of 411B08 using IMGT | |
| 65 | 411B08-CDRL1 | | Amino acid sequence of CDRL1 | RASQGVSSWLA |
| | (Kabat) | | of 411B08 using Kabat | |
| 66 | 411B08-CDRL2 | | Amino acid sequence of CDRL2 | GASSLQS |
| | (Kabat) | | of 411B08 using Kabat | |
| 67 | 411B08-CDRL3 | | Amino acid sequence of CDRL3 | QQANSIPFT |
| | (Kabat) | | of 411B08 using Kabat | |
| 68 | 411B08-Light chain | | Amino acid sequence of V_{L} of | DIQMTQSPSSVSASVGDRVTITCRASQGVSSWLAWYQQKSGKAPKLLIYGASSLQ |
| | variable region | | 411B08 | SGVPSRFSGSGSGTEFILTISSLQPEDFATYYCQQANSIPFTFGPGTKVDIK |
| 69 | 411B08-Light chain | | Nucleic acid sequence of V_{L} of | GACATCCAGATGACCCAGTCTCCATCTTCCGTGTCTGCATCTGTCGGAGACAGA |
| | variable region | | 411B08 | GTCACCATCACTTGTCGGGCGAGTCAGGGTGTTAGCAGCTGGTTAGCCTGGTAT |
| | | | | CAGCAGAAATCAGGGAAAGCCCCTAAGCTCCTGATCTATGGTGCATCCAGTTTG |
| | | | | CAAAGTGGGGTCCCATCAAGATTCAGCGGCAGTGGATCTGGGACAGAGTTCATT |
| | | | | CTCACCATCAGCAGCCTGCAGCCTGAAGATTTTGCAACTTACTATTGTCAACAGG |
| | | | | CTAACAGTATCCCATTCACTTTCGGCCCTGGGACCAAAGTGGATATCAAAC |
| 70 | 411B08-full light | | Amino acid sequence of 411B08 | DIQMTQSPSSVSASVGDRVTITCRASQGVSSWLAWYQQKSGKAPKLLIYGASSLQ |
| | chain sequence | | light chain | SGVPSRFSGSGSGTEFILTISSLQPEDFATYYCQQANSIPFTFGPGTKVDIKRTVAAP |
| | | | | SVFIFPPSDEQLKSGTASVVCLLNNFYPREAKVQWKVDNALQSGNSQESVTEQDSK |
| | | | | DSTYSLSSTLTLSKADYEKHKVYACEVTHQGLSSPVTKSFNRGEC |
| 71 | 41B08-full light | | Nucleic acid sequence of 411B08 | GACATCCAGATGACCCAGTCTCCATCTTCCGTGTCTGCATCTGTCGGAGACAGA |
| | chain sequence | | light chain | GTCACCATCACTTGTCGGGCGAGTCAGGGTGTTAGCAGCTGGTTAGCCTGGTAT |
| | | | | CAGCAGAAATCAGGGAAAGCCCCTAAGCTCCTGATCTATGGTGCATCCAGTTTG |
| | | | | CAAAGTGGGGTCCCATCAAGATTCAGCGGCAGTGGATCTGGGACAGAGTTCATT |
| | | | | CTCACCATCAGCAGCCTGCAGCCTGAAGATTTTGCAACTTACTATTGTCAACAGG |
| | | | | CTAACAGTATCCCATTCACTTTCGGCCCTGGGACCAAAGTGGATATCAAACGTAC |
| | | | | GGTGGCCGCTCCCTCCGTGTTCATCTTCCCACCTTCCGACGAGCAGCTGAAGTC |
| | | | | CGGCACCGCTTCTGTCGTGTGCCTGCTGAACAACTTCTACCCCCGCGAGGCCAA |
| | | | | GGTGCAGTGGAAGGTGGACAACGCCCTGCAGTCCGGCAACTCCCAGGAATCCGT |
| | | | | GACCGAGCAGGACTCCAAGGACAGCACCTACTCCCTGTCCTCCACCCTGACCCT |
| | | | | GTCCAAGGCCGACTACGAGAAGCACAAGGTGTACGCCTGCGAAGTGACCCACCA |
| | | | | GGGCCTGTCTAGCCCCGTGACCAAGTCTTTCAACCGGGGCGAGTGT |
| 72 | 411C04-CDRH1 | | Amino acid sequence of CDRH1 | GFTFSSYW |
| | (IMGT) | | of 411C04 using IMGT | |
| 73 | 411C04-CDRH2 | | Amino acid sequence of CDRH2 | IKEDGSEK |
| | (IMGT) | | of 411C04 using IMGT | |
| 74 | 411C04-CDRH3 | | Amino acid sequence of CDRH3 | ARVRLYSDFLDY |
| | (IMGT) | | of 411C04 using IMGT | |
| 75 | 411C04-CDRH1 | | Amino acid sequence of CDRH1 | SYWMS |
| | (Kabat) | | of 411C04 using Kabat | |
| 76 | 411C04-CDRH2 | | Amino acid sequence of CDRH2 | NIKEDGSEKYYVDSLKG |
| | (Kabat) | | of 411C04 using Kabat | |
| 77 | 411C04-CDRH3 | | Amino acid sequence of CDRH3 | VRLYSDFLDY |
| | (Kabat) | | of 411C04 using Kabat | |
| 78 | 411C04-Heavy chain | | Amino acid sequence of V_{H} of | EVQLVDSGGGLVQPGGSLRLSCAASGFTFSSYWMSWVRQAPGKGLEWVANIKED |
| | variable region | | 411C04 | GSEKYYVDSLKGRFTISRDNAKNSLYLQMNSLRAEDTSVYYCARVRLYSDFLDYWG |
| | | | | QGTLVTVSS |
| 79 | 411C04-Heavy chain | | Nucleic acid sequence of V_{H} of | GAGGTGCAGCTGGTGGACTCTGGGGGAGGCTTGGTCCAGCCTGGGGGGTCCCT |
| | variable region | | 411C04 | GAGACTCTCCTGTGCAGCCTCTGGATTCACGTTTAGTAGCTATTGGATGAGTTG |
| | | | | GGTCCGCCAGGCTCCAGGAAAGGGGCTGGAGTGGGTGGCCAACATAAAAGAAG |
| | | | | ATGGAAGTGAGAAATACTATGTAGACTCTTTGAAGGGCCGATTCACCATCTCCA |
| | | | | GAGACAACGCCAAGAACTCACTGTATCTGCAAATGAACAGCCTGAGAGCCGAGG |
| | | | | ACACGTCTGTGTATTACTGTGCGAGAGTTCGACTCTACAGTGACTTCCTTGACTA |
| | | | | CTGGGGCCAGGGAACCCTGGTCACCGTCTCCTCAG |
| 80 | 411C04-full heavy | | Amino acid sequence of 411C04 | EVQLVDSGGGLVQPGGSLRLSCAASGFTFSSYWMSWVRQAPGKGLEWVANIKED |
| | chain sequence | | heavy chain | GSEKYYVDSLKGRFTISRDNAKNSLYLQMNSLRAEDTSVYYCARVRLYSDFLDYWG |
| | | | | QGTLVTVSSASTKGPSVFPLAPSSKSTSGGTAALGCLVKDYFPEPVTVSWNSGALT |
| | | | | SGVHTFPAVLQSSGLYSLSSVVTVPSSSLGTQTYICNVNHKPSNTKVDKKVEPKSCD |
| | | | | KTHTCPPCPAPELLGGPSVFLFPPKPKDTLMISRTPEVTCVVVDVSHEDPEVKFNWY |
| | | | | VDGVEVHNAKTKPREEQYNSTYRWSVLTVLHQDWLNGKEYKCKVSNKALPAPIE |
| | | | | KTISKAKGQPREPQVYTLPPSRDELTKNQVSLTCLVKGFYPSDIAVEWESNGQPEN |
| | | | | NYKTTPPVLDSDGSFFLYSKLTVDKSRWQQGNVFSCSVMHEALHNHYTQKSLSLS |
| | | | | PGK |
| 81 | 411C04-full heavy | | Nucleic acid sequence of 411C04 | GAGGTGCAGCTGGTGGACTCTGGGGGAGGCTTGGTCCAGCCTGGGGGGTCCCT |
| | chain sequence | | heavy chain | GAGACTCTCCTGTGCAGCCTCTGGATTCACGTTTAGTAGCTATTGGATGAGTTG |
| | | | | GGTCCGCCAGGCTCCAGGAAAGGGGCTGGAGTGGGTGGCCAACATAAAAGAAG |
| | | | | ATGGAAGTGAGAAATACTATGTAGACTCTTTGAAGGGCCGATTCACCATCTCCA |
| | | | | GAGACAACGCCAAGAACTCACTGTATCTGCAAATGAACAGCCTGAGAGCCGAGG |
| | | | | ACACGTCTGTGTATTACTGTGCGAGAGTTCGACTCTACAGTGACTTCCTTGACTA |
| | | | | CTGGGGCCAGGGAACCCTGGTCACCGTCTCCTCAGCCAGCACCAAGGGCCCCTC |
| | | | | TGTGTTCCCTCTGGCCCCTTCCAGCAAGTCCACCTCTGGCGGAACAGCCGCTCT |
| | | | | GGGCTGCCTCGTGAAGGACTACTTCCCCGAGCCTGTGACCGTGTCCTGGAACTC |
| | | | | TGGCGCTCTGACCAGCGGAGTGCACACCTTCCCTGCTGTGCTGCAGTCCTCCGG |
| | | | | CCTGTACTCCCTGTCCTCCGTCGTGACCGTGCCTTCCAGCTCTCTGGGCACCCA |
| | | | | GACCTACATCTGCAACGTGAACCACAAGCCCTCCAACACCAAGGTGGACAAGAA |
| | | | | GGTGGAACCCAAGTCCTGCGACAAGACCCACACCTGTCCCCCTTGTCCTGCCCC |
| | | | | TGAACTGCTGGGCGGACCTTCCGTGTTCCTGTTCCCCCCAAAGCCCAAGGACAC |
| | | | | CCTGATGATCTCCCGGACCCCCGAAGTGACCTGCGTGGTGGTGGATGTGTCCCA |
| | | | | CGAGGACCCTGAAGTGAAGTTCAATTGGTACGTGGACGGCGTGGAAGTGCACAA |
| | | | | CGCCAAGACCAAGCCTAGAGAGGAACAGTACAACTCCACCTACCGGGTGGTGTC |
| | | | | CGTGCTGACCGTGCTGCACCAGGATTGGCTGAACGGCAAAGAGTACAAGTGCAA |
| | | | | GGTGTCCAACAAGGCCCTGCCTGCCCCCATCGAAAAGACCATCTCCAAGGCCAA |
| | | | | GGGCCAGCCCCGGGAACCCCAGGTGTACACACTGCCCCCTAGCAGGGACGAGCT |
| | | | | GACCAAGAACCAGGTGTCCCTGACCTGTCTCGTGAAAGGCTTCTACCCCTCCGA |
| | | | | TATCGCCGTGGAATGGGAGTCCAACGGCCAGCCTGAGAACAACTACAAGACCAC |
| | | | | CCCCCCTGTGCTGGACTCCGACGGCTCATTCTTCCTGTACAGCAAGCTGACAGT |
| | | | | GGACAAGTCCCGGTGGCAGCAGGGCAACGTGTTCTCCTGCTCCGTGATGCACGA |
| | | | | GGCCCTGCACAACCACTACACCCAGAAGTCCCTGTCCCTGAGCCCCGGCAAG |
| 82 | 411C04-CDRL1 | | Amino acid sequence of CDRL1 | QGVSSW |
| | (IMGT) | | of 411C04 using IMGT | |
| 83 | 411C04-CDRL2 | | Amino acid sequence of CDRL2 | GAS |
| | (IMGT) | | of 411C04 using IMGT | |
| 84 | 411C04-CDRL3 | | Amino acid sequence of CDRL3 | QQANSIPFT |
| | (IMGT) | | of 411C04 using IMGT | |
| 85 | 411C04-CDRL1 | | Amino acid sequence of CDRL1 | RASQGVSSWLA |
| | (Kabat) | | of 411C04 using Kabat | |
| 86 | 411C04-CDRL2 | | Amino acid sequence of CDRL2 | GASSLQS |
| | (Kabat) | | of 411C04 using Kabat | |
| 87 | 411C04-CDRL3 | | Amino acid sequence of CDRL3 | QQANSIPFT |
| | (Kabat) | | of 411C04 using Kabat | |
| 88 | 411C04-Light chain | | Amino acid sequence of V_{L} of | DIQMTQSPSSVSASVGDRVTITCRASQGVSSWLAWYQQKSGKAPKLLIYGASSLQ |
| | variable region | | 411C04 | SGVPSRFSGSGSGTEFILSISSLQPEDFATYYCQQANSIPFTFGPGTKVDIK |
| 89 | 411C04-Light chain | | Nucleic acid sequence of V_{L} of | GACATCCAGATGACCCAGTCTCCATCTTCCGTGTCTGCATCTGTCGGAGACAGA |
| | variable region | | 411C04 | GTCACCATCACTTGTCGGGCGAGTCAGGGTGTTAGCAGTTGGTTAGCCTGGTAT |
| | | | | CAGCAGAAATCAGGGAAAGCCCCTAAGCTCCTGATCTATGGTGCCTCCAGTTTG |
| | | | | CAAAGTGGGGTCCCATCAAGATTCAGCGGCAGTGGATCTGGGACAGAGTTCATT |
| | | | | CTCAGCATCAGCAGCCTGCAGCCTGAAGATTTTGCAACTTACTATTGTCAACAGG |
| | | | | CTAACAGTATCCCATTCACTTTCGGCCCTGGGACCAAAGTGGATATCAAAC |
| 90 | 411C04-full light | | Amino acid sequence of 411C04 | DIQMTQSPSSVSASVGDRVTITCRASQGVSSWLAWYQQKSGKAPKLLIYGASSLQ |
| | chain sequence | | light chain | SGVPSRFSGSGSGTEFILSISSLQPEDFATYYCQQANSIPFTFGPGTKVDIKRTVAAP |
| | | | | SVFIFPPSDEQLKSGTASVVCLLNNFYPREAKVQWKVDNALQSGNSQESVTEQDSK |
| | | | | DSTYSLSSTLTLSKADYEKHKVYACEVTHQGLSSPVTKSFNRGEC |
| 91 | 411C04-full light | | Nucleic acid sequence of 411C04 | GACATCCAGATGACCCAGTCTCCATCTTCCGTGTCTGCATCTGTCGGAGACAGA |
| | chain sequence | | light chain | GTCACCATCACTTGTCGGGCGAGTCAGGGTGTTAGCAGTTGGTTAGCCTGGTAT |
| | | | | CAGCAGAAATCAGGGAAAGCCCCTAAGCTCCTGATCTATGGTGCCTCCAGTTTG |
| | | | | CAAAGTGGGGTCCCATCAAGATTCAGCGGCAGTGGATCTGGGACAGAGTTCATT |
| | | | | CTCAGCATCAGCAGCCTGCAGCCTGAAGATTTTGCAACTTACTATTGTCAACAGG |
| | | | | CTAACAGTATCCCATTCACTTTCGGCCCTGGGACCAAAGTGGATATCAAACGTAC |
| | | | | GGTGGCCGCTCCCTCCGTGTTCATCTTCCCACCTTCCGACGAGCAGCTGAAGTC |
| | | | | CGGCACCGCTTCTGTCGTGTGCCTGCTGAACAACTTCTACCCCCGCGAGGCCAA |
| | | | | GGTGCAGTGGAAGGTGGACAACGCCCTGCAGTCCGGCAACTCCCAGGAATCCGT |
| | | | | GACCGAGCAGGACTCCAAGGACAGCACCTACTCCCTGTCCTCCACCCTGACCCT |
| | | | | GTCCAAGGCCGACTACGAGAAGCACAAGGTGTACGCCTGCGAAGTGACCCACCA |
| | | | | GGGCCTGTCTAGCCCCGTGACCAAGTCTTTCAACCGGGGCGAGTGT |
| 92 | 411D07-CDRH1 | | Amino acid sequence of CDRH1 | GGSIISSDW |
| | (IMGT) | | of 411D07 using IMGT | |
| 93 | 411D07-CDRH2 | | Amino acid sequence of CDRH2 | IFHSGRT |
| | (IMGT) | | of 411D07 using IMGT | |
| 94 | 411D07-CDRH3 | | Amino acid sequence of CDRH3 | ARDGSGSY |
| | (IMGT) | | of 411D07 using IMGT | |
| 95 | 411D07-CDRH1 | | Amino acid sequence of CDRH1 | SSDWWN |
| | (Kabat) | | of 411D07 using Kabat | |
| 96 | 411D07-CDRH2 | | Amino acid sequence of CDRH2 | EIFHSGRTNYNPSLKS |
| | (Kabat) | | of 411D07 using Kabat | |
| 97 | 411D07-CDRH3 | | Amino acid sequence of CDRH3 | DGSGSY |
| | (Kabat) | | of 411D07 using Kabat | |
| 98 | 411D07-Heavy chain | | Amino acid sequence of V_{H} of | QVQLQESGPGLVKPSGTLSLTCIVSGGSTISSDWWNWVRQPPGKGLEWIGEIFHS |
| | variable region | | 411D07 | GRTNYNPSLKSRVTISIDKSKNQFSLRLSSVTAADTAVYYCARDGSGSYWGQGTLV |
| | | | | TVSS |
| 99 | 411D07-Heavy chain | | Nucleic acid sequence of V_{H} of | CAGGTGCAGCTGCAGGAGTCGGGCCCAGGACTGGTGAAGCCTTCGGGGACCCT |
| | variable region | | 411D07 | GTCCCTCACCTGCATTGICTCTGGTGGCTCCATCATCAGTAGTGACTGGIGGAA |
| | | | | TTGGGTCCGCCAGCCCCCAGGGAAGGGGCTGGAGIGGATTGGAGAAATCTTTC |
| | | | | ATAGTGGGAGGACCAACTACAACCCGTCCCTCAAGAGTCGAGICACCATATCAA |
| | | | | TAGACAAGTCCAAGAATCAGTTCTCCCTGAGGCTGAGCTCTGTGACCGCCGCGG |
| | | | | ACACGGCCGTGTATTACTGTGCGAGAGATGGTTCGGGGAGTTACTGGGGCCAG |
| | | | | GGAACCCTGGTCACCGTCTCCTCAG |
| 100 | 411D07-full heavy | | Amino acid sequence of 411D07 | QVQLQESGPGLVKPSGTLSLTCIVSGGSTISSDWWNWVRQPPGKGLEWIGEIFHS |
| | chain sequence | | heavy chain | GRTNYNPSLKSRVTISIDKSKNQFSLRLSSVTAADTAVYYCARDGSGSYWGQGTLV |
| | | | | TVSSASTKGPSVFPLAPSSKSTSGGTAALGCLVKDYFPEPVTVSWNSGALTSGVHT |
| | | | | FPAVLQSSGLYSLSSVVTVPSSSLGTQTYICNVNHKPSNTKVDKKVEPKSCDKTHTC |
| | | | | PPCPAPELLGGPSVFLFPPKPKDTLMISRTPEVTCVVVDVSHEDPEVKFNWYVDGV |
| | | | | EVHNAKTKPREEQYNSTYRVVSVLTVLHQDWLNGKEYKCKVSNKALPAPIEKTISK |
| | | | | AKGQPREPQVYTLPPSRDELTKNQVSLTCLVKGFYPSDIAVEWESNGQPENNYKTT |
| | | | | PPVLDSDGSFFLYSKLTVDKSRWQQGNVFSCSVMHEALHNHYTQKSLSLSPGK |
| 101 | 411D07-full heavy | | Nucleic acid sequence of 411D07 | CAGGTGCAGCTGCAGGAGTCGGGCCCAGGACTGGTGAAGCCTTCGGGGACCCT |
| | chain sequence | | heavy chain | GTCCCTCACCTGCATTGTCTCTGGTGGCTCCATCATCAGTAGTGACTGGTGGAA |
| | | | | TTGGGTCCGCCAGCCCCCAGGGAAGGGGCTGGAGTGGATTGGAGAAATCTTTC |
| | | | | ATAGTGGGAGGACCAACTACAACCCGTCCCTCAAGAGTCGAGTCACCATATCAA |
| | | | | TAGACAAGTCCAAGAATCAGTTCTCCCTGAGGCTGAGCTCTGTGACCGCCGCGG |
| | | | | ACACGGCCGTGTATTACTGTGCGAGAGATGGTTCGGGGAGTTACTGGGGCCAG |
| | | | | GGAACCCTGGTCACCGTCTCCTCAGCCAGCACCAAGGGCCCCTCTGTGTTCCCT |
| | | | | CTGGCCCCTTCCAGCAAGTCCACCTCTGGCGGAACAGCCGCTCTGGGCTGCCTC |
| | | | | GTGAAGGACTACTTCCCCGAGCCTGTGACCGTGTCCTGGAACTCTGGCGCTCTG |
| | | | | ACCAGCGGAGTGCACACCTTCCCTGCTGTGCTGCAGTCCTCCGGCCTGTACTCC |
| | | | | CTGTCCTCCGTCGTGACCGTGCCTTCCAGCTCTCTGGGCACCCAGACCTACATC |
| | | | | TGCAACGTGAACCACAAGCCCTCCAACACCAAGGTGGACAAGAAGGTGGAACCC |
| | | | | AAGTCCTGCGACAAGACCCACACCTGTCCCCCTTGTCCTGCCCCTGAACTGCTG |
| | | | | GGCGGACCTTCCGTGTTCCTGTTCCCCCCAAAGCCCAAGGACACCCTGATGATC |
| | | | | TCCCGGACCCCCGAAGTGACCTGCGTGGTGGTGGATGTGTCCCACGAGGACCCT |
| | | | | GAAGTGAAGTTCAATTGGTACGTGGACGGCGTGGAAGTGCACAACGCCAAGACC |
| | | | | AAGCCTAGAGAGGAACAGTACAACTCCACCTACCGGGTGGTGTCCGTGCTGACC |
| | | | | GTGCTGCACCAGGATTGGCTGAACGGCAAAGAGTACAAGTGCAAGGTGTCCAAC |
| | | | | AAGGCCCTGCCTGCCCCCATCGAAAAGACCATCTCCAAGGCCAAGGGCCAGCCC |
| | | | | CGGGAACCCCAGGTGTACACACTGCCCCCTAGCAGGGACGAGCTGACCAAGAAC |
| | | | | CAGGTGTCCCTGACCTGTCTCGTGAAAGGCTTCTACCCCTCCGATATCGCCGTG |
| | | | | GAATGGGAGTCCAACGGCCAGCCTGAGAACAACTACAAGACCACCCCCCCTGTG |
| | | | | CTGGACTCCGACGGCTCATTCTTCCTGTACAGCAAGCTGACAGTGGACAAGTCC |
| | | | | CGGTGGCAGCAGGGCAACGTGTTCTCCTGCTCCGTGATGCACGAGGCCCTGCAC |
| | | | | AACCACTACACCCAGAAGTCCCTGTCCCTGAGCCCCGGCAAG |
| 102 | 411D07-CDRL1 | | Amino acid sequence of CDRL1 | QSVLYSSNNKNY |
| | (IMGT) | | of 411D07 using IMGT | |
| 103 | 411D07-CDRL2 | | Amino acid sequence of CDRL2 | WAS |
| | (IMGT) | | of 411D07 using IMGT | |
| 104 | 411D07-CDRL3 | | Amino acid sequence of CDRL3 | QQYYSNRS |
| | (IMGT) | | of 411D07 using IMGT | |
| 105 | 411D07-CDRL1 | | Amino acid sequence of CDRL1 | KSSQSVLYSSNNKNYLA |
| | (Kabat) | | of 411D07 using Kabat | |
| 106 | 411D07-CDRL2 | | Amino acid sequence of CDRL2 | WASTRES |
| | (Kabat) | | of 411D07 using Kabat | |
| 107 | 411D07-CDRL3 | | Amino acid sequence of CDRL3 | QQYYSNRS |
| | (Kabat) | | of 411D07 using Kabat | |
| 108 | 411D07-Light chain | | Amino acid sequence of V_{L} of | DIVMTQSPDSLAVSLGERATINCKSSQSVLYSSNNKNYLAWYQQKSGQPPKLLIYW |
| | variable region | | 411D07 | ASTRESGVPDRFSGSGSGTDFTLTISSLQTEDVAVYYCQQYYSNRSFGQGTKLEIK |
| 109 | 411D07-Light chain | | Nucleic acid sequence of V_{L} of | GACATCGTGATGACCCAGTCTCCAGACTCCCTGGCTGIGTCTCTGGGCGAGAGG |
| | variable region | | 411D07 | GCCACCATCAACTGCAAGTCCAGCCAGAGTGTTTTATACAGCTCCAACAATAAGA |
| | | | | ATTACTTAGCTTGGTACCAGCAGAAATCAGGACAGCCTCCTAAGTTGCTCATTTA |
| | | | | CTGGGCATCTACCCGGGAATCCGGGGTCCCTGACCGATTCAGTGGCAGCGGGT |
| | | | | CTGGGACAGATTTCACTCTCACCATCAGCAGCCTGCAGACTGAAGATGTGGCAG |
| | | | | TTTATTACTGTCAGCAATATTATAGTAATCGCAGTTTTGGCCAGGGGACCAAGCT |
| | | | | GGAGATCAAAC |
| 110 | 411D07-full light | | Amino acid sequence of 411D07 | DIVMTQSPDSLAVSLGERATINCKSSQSVLYSSNNKNYLAWYQQKSGQPPKLLIYW |
| | chain sequence | | light chain | ASTRESGVPDRFSGSGSGTDFTLTISSLQTEDVAVYYCQQYYSNRSFGQGTKLEIK |
| | | | | RTVAAPSVFIFPPSDEQLKSGTASVVCLLNNFYPREAKVQWKVDNALQSGNSQESV |
| | | | | TEQDSKDSTYSLSSTLTLSKADYEKHKVYACEVTHQGLSSPVTKSFNRGEC |
| 111 | 411D07-full light | | Nucleic acid sequence of 411D07 | GACATCGTGATGACCCAGTCTCCAGACTCCCTGGCTGTGTCTCTGGGCGAGAGG |
| | chain sequence | | light chain | GCCACCATCAACTGCAAGTCCAGCCAGAGTGTTTTATACAGCTCCAACAATAAGA |
| | | | | ATTACTTAGCTTGGTACCAGCAGAAATCAGGACAGCCTCCTAAGTTGCTCATTTA |
| | | | | CTGGGCATCTACCCGGGAATCCGGGGTCCCTGACCGATTCAGTGGCAGCGGGT |
| | | | | CTGGGACAGATTTCACTCTCACCATCAGCAGCCTGCAGACTGAAGATGTGGCAG |
| | | | | TTTATTACTGTCAGCAATATTATAGTAATCGCAGTTTTGGCCAGGGGACCAAGCT |
| | | | | GGAGATCAAACGTACGGTGGCCGCTCCCTCCGTGTTCATCTTCCCACCTTCCGA |
| | | | | CGAGCAGCTGAAGTCCGGCACCGCTTCTGTCGTGTGCCTGCTGAACAACTTCTA |
| | | | | CCCCCGCGAGGCCAAGGTGCAGTGGAAGGTGGACAACGCCCTGCAGTCCGGCA |
| | | | | ACTCCCAGGAATCCGTGACCGAGCAGGACTCCAAGGACAGCACCTACTCCCTGT |
| | | | | CCTCCACCCTGACCCTGTCCAAGGCCGACTACGAGAAGCACAAGGTGTACGCCT |
| | | | | GCGAAGTGACCCACCAGGGCCIGTCTAGCCCCGTGACCAAGTCTTTCAACCGGG |
| | | | | GCGAGTGT |
| 112 | 385F01-CDRH1 | | Amino acid sequence of CDRH1 | GFTFSSYW |
| | (IMGT) | | of 385F01 using IMGT | |
| 113 | 385F01-CDRH2 | | Amino acid sequence of CDRH2 | IKEDGSEK |
| | (IMGT) | | of 385F01 using IMGT | |
| 114 | 385F01-CDRH3 | | Amino acid sequence of CDRH3 | ARNRLYSDFLDN |
| | (IMGT) | | of 385F01 using IMGT | |
| 115 | 385F01-CDRH1 | | Amino acid sequence of CDRH1 | SYWMS |
| | (Kabat) | | of 385F01 using Kabat | |
| 116 | 385F01-CDRH2 | | Amino acid sequence of CDRH2 | NIKEDGSEKYYVDSVKG |
| | (Kabat) | | of 385F01 using Kabat | |
| 117 | 385F01-CDRH3 | | Amino acid sequence of CDRH3 | NRLYSDFLDN |
| | (Kabat) | | of 385F01 using Kabat | |
| 118 | 385F01-Heavy chain | | Amino acid sequence of V_{H} of | EVQLVESGGGLVQPGGSLRLSCAASGFTFSSYWMSWVRQAPGKGLEWVANIKED |
| | variable region | | 385F01 | GSEKYYVDSVKGRFTISRDNAKNSLYLQMNSLRAEDTSVYYCARNRLYSDFLDNW |
| | | | | GQGTLVTVSS |
| 119 | 385F01-Heavy chain | | Nucleic acid sequence of V_{H} of | GAGGTGCAGCTGGTGGAGTCTGGGGGAGGCTTGGTCCAGCCTGGGGGGTCCCT |
| | variable region | | 385F01 | GAGACTCTCCTGTGCAGCCTCTGGATTCACGTTTAGTAGCTATTGGATGAGTTG |
| | | | | GGTCCGCCAGGCTCCAGGGAAGGGGCTGGAGTGGGTGGCCAACATCAAAGAAG |
| | | | | ATGGAAGTGAGAAATACTATGTCGACTCTGTGAAGGGCCGATTCACCATCTCCA |
| | | | | GAGACAACGCCAAGAACTCACTGTATCTGCAAATGAACAGCCTGAGAGCCGAGG |
| | | | | ACACGTCTGTGTATTACTGTGCGAGAAATCGACTCTACAGTGACTTCCTTGACAA |
| | | | | CTGGGGCCAGGGAACCCTGGTCACCGTCTCCTCAG |
| 120 | 385F01-full heavy | | Amino acid sequence of 385F01 | EVQLVESGGGLVQPGGSLRLSCAASGFTFSSYWMSWVRQAPGKGLEWVANIKED |
| | chain sequence | | heavy chain | GSEKYYVDSVKGRFTISRDNAKNSLYLQMNSLRAEDTSVYYCARNRLYSDFLDNW |
| | | | | GQGTLVTVSSASTKGPSVFPLAPSSKSTSGGTAALGCLVKDYFPEPVTVSWNSGAL |
| | | | | TSGVHTFPAVLQSSGLYSLSSVVTVPSSSLGTQTYICNVNHKPSNTKVDKKVEPKSC |
| | | | | DKTHTCPPCPAPELLGGPSVFLFPPKPKDILMISRTPEVTCVVVDVSHEDPEVKFN |
| | | | | WYVDGVEVHNAKTKPREEQYNSTYRVVSVLTVLHQDWLNGKEYKCKVSNKALPAP |
| | | | | IEKTISKAKGQPREPQVYTLPPSRDELTKNQVSLTCLVKGFYPSDIAVEWESNGQPE |
| | | | | NNYKTTPPVLDSDGSFFLYSKLTVDKSRWQQGNVFSCSVMHEALHNHYTQKSLSL |
| | | | | SPGK |
| 121 | 385F01-full heavy | | Nucleic acid sequence of 385F01 | GAGGTGCAGCTGGTGGAGTCTGGGGGAGGCTTGGTCCAGCCTGGGGGGTCCCT |
| | chain sequence | | heavy chain | GAGACTCTCCTGTGCAGCCTCTGGATTCACGTTTAGTAGCTATTGGATGAGTTG |
| | | | | GGTCCGCCAGGCTCCAGGGAAGGGGCTGGAGTGGGTGGCCAACATCAAAGAAG |
| | | | | ATGGAAGTGAGAAATACTATGTCGACTCTGTGAAGGGCCGATTCACCATCTCCA |
| | | | | GAGACAACGCCAAGAACTCACTGTATCTGCAAATGAACAGCCTGAGAGCCGAGG |
| | | | | ACACGTCTGTGTATTACTGTGCGAGAAATCGACTCTACAGTGACTTCCTTGACAA |
| | | | | CTGGGGCCAGGGAACCCTGGTCACCGTCTCCTCAGCCAGCACCAAGGGCCCCTC |
| | | | | TGTGTTCCCTCTGGCCCCTTCCAGCAAGTCCACCTCTGGCGGAACAGCCGCTCT |
| | | | | GGGCTGCCTCGTGAAGGACTACTTCCCCGAGCCTGTGACCGTGTCCTGGAACTC |
| | | | | TGGCGCTCTGACCAGCGGAGTGCACACCTTCCCTGCTGTGCTGCAGTCCTCCGG |
| | | | | CCTGTACTCCCTGTCCTCCGTCGTGACCGTGCCTTCCAGCTCTCTGGGCACCCA |
| | | | | GACCTACATCTGCAACGTGAACCACAAGCCCTCCAACACCAAGGTGGACAAGAA |
| | | | | GGTGGAACCCAAGTCCTGCGACAAGACCCACACCTGTCCCCCTTGTCCTGCCCC |
| | | | | TGAACTGCTGGGCGGACCTTCCGTGTTCCTGTTCCCCCCAAAGCCCAAGGACAC |
| | | | | CCTGATGATCTCCCGGACCCCCGAAGTGACCTGCGTGGTGGTGGATGTGTCCCA |
| | | | | CGAGGACCCTGAAGTGAAGTTCAATTGGTACGTGGACGGCGTGGAAGTGCACAA |
| | | | | CGCCAAGACCAAGCCTAGAGAGGAACAGTACAACTCCACCTACCGGGTGGTGTC |
| | | | | CGTGCTGACCGTGCTGCACCAGGATTGGCTGAACGGCAAAGAGTACAAGTGCAA |
| | | | | GGTGTCCAACAAGGCCCTGCCTGCCCCCATCGAAAAGACCATCTCCAAGGCCAA |
| | | | | GGGCCAGCCCCGGGAACCCCAGGTGTACACACTGCCCCCTAGCAGGGACGAGCT |
| | | | | GACCAAGAACCAGGTGTCCCTGACCTGTCTCGTGAAAGGCTTCTACCCCTCCGA |
| | | | | TATCGCCGTGGAATGGGAGTCCAACGGCCAGCCTGAGAACAACTACAAGACCAC |
| | | | | CCCCCCTGTGCTGGACTCCGACGGCTCATTCTTCCTGTACAGCAAGCTGACAGT |
| | | | | GGACAAGTCCCGGTGGCAGCAGGGCAACGTGTTCTCCTGCTCCGTGATGCACGA |
| | | | | GGCCCTGCACAACCACTACACCCAGAAGTCCCTGTCCCTGAGCCCCGGCAAG |
| 122 | 385F01-CDRL1 | | Amino acid sequence of CDRL1 | QGVSSW |
| | (IMGT) | | of 385F01 using IMGT | |
| 123 | 385F01-CDRL2 | | Amino acid sequence of CDRL2 | GAS |
| | (IMGT) | | of 385F01 using IMGT | |
| 124 | 385F01-CDRL3 | | Amino acid sequence of CDRL3 | QQANSIPFT |
| | (IMGT) | | of 385F01 using IMGT | |
| 125 | 385F01-CDRL1 | | Amino acid sequence of CDRL1 | RASQGVSSWLA |
| | (Kabat) | | of 385F01 using Kabat | |
| 126 | 385F01-CDRL2 | | Amino acid sequence of CDRL2 | GASSLQS |
| | (Kabat) | | of 385F01 using Kabat | |
| 127 | 385F01-CDRL3 | | Amino acid sequence of CDRL3 | QQANSIPFT |
| | (Kabat) | | of 385F01 using Kabat | |
| 128 | 385F01-Light chain | | Amino acid sequence of V_{L} of | DIQMTQSPSSVSASVGDRVTITCRASQGVSSWLAWYQQKSGKAPKLLIYGASSLQ |
| | variable region | | 385F01 | SGVPSRFSGSGSGTEFILTISSLQPEDFATYYCQQANSIPFTFGPGTKVDIK |
| 129 | 385F01-Light chain | | Nucleic acid sequence of V_{L} of | GACATCCAGATGACCCAGTCTCCATCTTCCGTGTCTGCATCTGTCGGAGACAGA |
| | variable region | | 385F01 | GTCACCATCACTTGTCGGGCGAGTCAGGGTGTTAGCAGCTGGTTAGCCTGGTAT |
| | | | | CAGCAGAAATCAGGGAAAGCCCCTAAGCTCCTGATCTATGGTGCATCCAGTTTG |
| | | | | CAAAGTGGGGTCCCATCAAGATTCAGCGGCAGTGGATCTGGGACAGAGTTCATT |
| | | | | CTCACCATCAGCAGCCTGCAGCCTGAAGATTTTGCAACTTACTATTGTCAACAGG |
| | | | | CTAACAGTATCCCATTCACTTTCGGCCCTGGGACCAAAGTGGATATCAAAC |
| 130 | 385F01-full light | | Amino acid sequence of 385F01 | DIQMTQSPSSVSASVGDRVTITCRASQGVSSWLAWYQQKSGKAPKLLIYGASSLQ |
| | chain sequence | | light chain | SGVPSRFSGSGSGTEFILTISSLQPEDFAMCQQANSIPFTFGPGTKVDIKRTVAAP |
| | | | | SVFIFPPSDEQLKSGTASVVCLLNNFYPREAKVQWKVDNALQSGNSQESVTEQDSK |
| | | | | DSTYSLSSTLTLSKADYEKHKVYACEVTHQGLSSPVTKSFNRGEC |
| 131 | 385F01-full light | | Nucleic acid sequence of 385F01 | GACATCCAGATGACCCAGTCTCCATCTTCCGTGTCTGCATCTGTCGGAGACAGA |
| | chain sequence | | light chain | GTCACCATCACTTGTCGGGCGAGTCAGGGTGTTAGCAGCTGGTTAGCCTGGTAT |
| | | | | CAGCAGAAATCAGGGAAAGCCCCTAAGCTCCTGATCTATGGTGCATCCAGTTTG |
| | | | | CAAAGTGGGGTCCCATCAAGATTCAGCGGCAGTGGATCTGGGACAGAGTTCATT |
| | | | | CTCACCATCAGCAGCCTGCAGCCTGAAGATTTTGCAACTTACTATTGTCAACAGG |
| | | | | CTAACAGTATCCCATTCACTTTCGGCCCTGGGACCAAAGTGGATATCAAACGTAC |
| | | | | GGTGGCCGCTCCCTCCGTGTTCATCTTCCCACCTTCCGACGAGCAGCTGAAGTC |
| | | | | CGGCACCGCTTCTGTCGTGTGCCTGCTGAACAACTTCTACCCCCGCGAGGCCAA |
| | | | | GGTGCAGTGGAAGGTGGACAACGCCCTGCAGTCCGGCAACTCCCAGGAATCCGT |
| | | | | GACCGAGCAGGACTCCAAGGACAGCACCTACTCCCTGTCCTCCACCCTGACCCT |
| | | | | GTCCAAGGCCGACTACGAGAAGCACAAGGTGTACGCCTGCGAAGTGACCCACCA |
| | | | | GGGCCTGTCTAGCCCCGTGACCAAGTCTTTCAACCGGGGCGAGTGT |
| 132 | 413D08-CDRH1 | | Amino acid sequence of CDRH1 | GFTFRIYG |
| | (IMGT) | | of 413D08 using IMGT | |
| 133 | 413D08-CDRH2 | | Amino acid sequence of CDRH2 | IWYDGSNK |
| | (IMGT) | | of 413D08 using IMGT | |
| 134 | 413D08-CDRH3 | | Amino acid sequence of CDRH3 | ARDMDYFGMDV |
| | (IMGT) | | of 413D08 using IMGT | |
| 135 | 413D08-CDRH1 | | Amino acid sequence of CDRH1 | IYGMH |
| | (Kabat) | | of 413D08 using Kabat | |
| 136 | 413D08-CDRH2 | | Amino acid sequence of CDRH2 | VIWYDGSNKYYADSVKG |
| | (Kabat) | | of 413D08 using Kabat | |
| 137 | 413D08-CDRH3 | | Amino acid sequence of CDRH3 | DMDYFGMDV |
| | (Kabat) | | of 413D08 using Kabat | |
| 138 | 413D08-Heavy chain | | Amino acid sequence of V_{H} of | QVQLVESGGGVVQPGRSLRLSCAASGFTFRIYGMHWVRQAPGKGLEWVAVIWYD |
| | variable region | | 413D08 | GSNKYYADSVKGRFTISRDNSDNTLYLQMNSLRAEDTAVYYCARDMDYFGMDVW |
| | | | | GQGTTVTVSS |
| 139 | 413D08-Heavy chain | | Nucleic acid sequence of V_{H} of | CAGGTGCAGCTGGTGGAGTCTGGGGGAGGCGTGGTCCAGCCTGGGAGGTCCCT |
| | variable region | | 413D08 | GAGACTCTCCTGTGCAGCGTCTGGATTCACCTTCCGTATTTATGGCATGCACTG |
| | | | | GGTCCGCCAGGCTCCAGGCAAGGGGCTGGAGTGGGTGGCAGTTATATGGTATG |
| | | | | ATGGAAGTAATAAATACTATGCTGACTCCGTGAAGGGCCGATTCACCATCTCCA |
| | | | | GAGACAATTCCGACAACACGCTGTATCTGCAAATGAACAGCCTGAGAGCCGAGG |
| | | | | ACACGGCTGTGTATTACTGTGCGAGAGATATGGACTACTTCGGTATGGACGTCT |
| | | | | GGGGCCAAGGGACCACGGTCACCGTCTCCTCAG |
| 140 | 413D08-full heavy | | Amino acid sequence of 413D08 | QVQLVESGGGWQPGRSLRLSCAASGFTFRIYGMHWVRQAPGKGLEWVAVIWYD |
| | chain sequence | | heavy chain | GSNKYYADSVKGRFTISRDNSDNTLYLQMNSLRAEDTAVYYCARDMDYFGMDVW |
| | | | | GQGTTVTVSSASTKGPSVFPLAPSSKSTSGGTAALGCLVKDYFPEPVTVSWNSGAL |
| | | | | TSGVHTFPAVLQSSGLYSLSSVVTVPSSSLGTQTYICNVNHKPSNTKVDKKVEPKSC |
| | | | | DKTHTCPPCPAPELLGGPSVFLFPPKPKDILMISRTPEVTCVVVDVSHEDPEVKFN |
| | | | | WYVDGVEVHNAKTKPREEQYNSTYRWSVLTVLHQDWLNGKEYKCKVSNKALPAP |
| | | | | IEKTISKAKGQPREPQVYTLPIDSRDELTKNQVSLTCLVKGFYPSDIAVEWESNGQPE |
| | | | | NNYKTTPPVLDSDGSFFLYSKLTVDKSRWQQGNVFSCSVMHEALHNHYTQKSLSL |
| | | | | SPGK |
| 141 | 413D08-full heavy | | Nucleic acid sequence of 413D08 | CAGGTGCAGCTGGTGGAGTCTGGGGGAGGCGTGGTCCAGCCTGGGAGGTCCCT |
| | chain sequence | | heavy chain | GAGACTCTCCTGTGCAGCGTCTGGATTCACCTTCCGTATTTATGGCATGCACTG |
| | | | | GGTCCGCCAGGCTCCAGGCAAGGGGCTGGAGTGGGTGGCAGTTATATGGTATG |
| | | | | ATGGAAGTAATAAATACTATGCTGACTCCGTGAAGGGCCGATTCACCATCTCCA |
| | | | | GAGACAATTCCGACAACACGCTGTATCTGCAAATGAACAGCCTGAGAGCCGAGG |
| | | | | ACACGGCTGTGTATTACTGTGCGAGAGATATGGACTACTTCGGTATGGACGTCT |
| | | | | GGGGCCAAGGGACCACGGTCACCGTCTCCTCAGCCAGCACCAAGGGCCCCTCTG |
| | | | | TGTTCCCTCTGGCCCCTTCCAGCAAGTCCACCTCTGGCGGAACAGCCGCTCTGG |
| | | | | GCTGCCTCGTGAAGGACTACTTCCCCGAGCCTGTGACCGTGTCCTGGAACTCTG |
| | | | | GCGCTCTGACCAGCGGAGTGCACACCTTCCCTGCTGTGCTGCAGTCCTCCGGCC |
| | | | | TGTACTCCCTGTCCTCCGTCGTGACCGTGCCTTCCAGCTCTCTGGGCACCCAGA |
| | | | | CCTACATCTGCAACGTGAACCACAAGCCCTCCAACACCAAGGTGGACAAGAAGG |
| | | | | TGGAACCCAAGTCCTGCGACAAGACCCACACCTGTCCCCCTTGTCCTGCCCCTGA |
| | | | | ACTGCTGGGCGGACCTTCCGTGTTCCTGTTCCCCCCAAAGCCCAAGGACACCCT |
| | | | | GATGATCTCCCGGACCCCCGAAGTGACCTGCGTGGTGGTGGATGTGTCCCACGA |
| | | | | GGACCCTGAAGTGAAGTTCAATTGGTACGTGGACGGCGTGGAAGTGCACAACGC |
| | | | | CAAGACCAAGCCTAGAGAGGAACAGTACAACTCCACCTACCGGGTGGTGTCCGT |
| | | | | GCTGACCGTGCTGCACCAGGATTGGCTGAACGGCAAAGAGTACAAGTGCAAGGT |
| | | | | GTCCAACAAGGCCCTGCCTGCCCCCATCGAAAAGACCATCTCCAAGGCCAAGGG |
| | | | | CCAGCCCCGGGAACCCCAGGTGTACACACTGCCCCCTAGCAGGGACGAGCTGAC |
| | | | | CAAGAACCAGGTGTCCCTGACCTGTCTCGTGAAAGGCTTCTACCCCTCCGATAT |
| | | | | CGCCGTGGAATGGGAGTCCAACGGCCAGCCTGAGAACAACTACAAGACCACCCC |
| | | | | CCCTGTGCTGGACTCCGACGGCTCATTCTTCCTGTACAGCAAGCTGACAGTGGA |
| | | | | CAAGTCCCGGTGGCAGCAGGGCAACGTGTTCTCCTGCTCCGTGATGCACGAGGC |
| | | | | CCTGCACAACCACTACACCCAGAAGTCCCTGTCCCTGAGCCCCGGCAAG |
| 142 | 413D08-CDRL1 | | Amino acid sequence of CDRL1 | QGIRND |
| | (IMGT) | | of 413D08 using IMGT | |
| 143 | 413D08-CDRL2 | | Amino acid sequence of CDRL2 | MS |
| | (IMGT) | | of 413D08 using IMGT | |
| 144 | 413D08-CDRL3 | | Amino acid sequence of CDRL3 | LQHNSYPRT |
| | (IMGT) | | of 413D08 using IMGT | |
| 145 | 413D08-CDRL1 | | Amino acid sequence of CDRL1 | RASQGIRNDLG |
| | (Kabat) | | of 413D08 using Kabat | |
| 146 | 413D08-CDRL2 | | Amino acid sequence of CDRL2 | AASSLQS |
| | (Kabat) | | of 413D08 using Kabat | |
| 147 | 413D08-CDRL3 | | Amino acid sequence of CDRL3 | LQHNSYPRT |
| | (Kabat) | | of 413D08 using Kabat | |
| 148 | 413D08-Light chain | | Amino acid sequence of V_{L} of | DLQMTQSPSSLSASVGDRVTITCRASQGIRNDLGWYQQKPGKAPKRLIYAASSLQS |
| | variable region | | 413D08 | GVPSRFSGSGSGTEFTLTISSLQPEDFATYYCLQHNSYPRTFGQGTKVEIK |
| 149 | 413D08-Light chain | | Nucleic acid sequence of V_{L} of | GACCTCCAGATGACCCAGTCTCCATCCTCCCTGTCTGCATCTGTAGGAGACAGA |
| | variable region | | 413D08 | GTCACCATCACTTGCCGGGCAAGTCAGGGCATTAGAAATGATTTAGGCTGGTAT |
| | | | | CAGCAGAAACCAGGGAAAGCCCCTAAGCGCCTGATCTATGCTGCATCCAGTTTG |
| | | | | CAAAGTGGGGTCCCATCAAGGTTCAGCGGCAGTGGATCTGGGACAGAATTCACT |
| | | | | CTCACAATCAGCAGCCTGCAGCCTGAAGATTTTGCAACTTATTACTGTCTACAGC |
| | | | | ATAATAGTTACCCTCGGACGTTCGGCCAAGGGACCAAGGTGGAAATCAAAC |
| 150 | 413D08-full light | | Amino acid sequence of 413D08 | DLQMTQSPSSLSASVGDRVTITCRASQGIRNDLGWYQQKPGKAPKRLIYAASSLQS |
| | chain sequence | | light chain | GVPSRFSGSGSGTEFTLTISSLQPEDFATYYCLQHNSYPRTFGQGTWEIKRTVAAP |
| | | | | SVFIFPPSDEQLKSGTASVVCLLNNFYPREAKVQWKVDNALQSGNSQESVTEQDSK |
| | | | | DSTYSLSSTLTLSKADYEKHKVYACEVTHQGLSSPVTKSFNRGEC |
| 151 | 413D08-full light | | Nucleic acid sequence of 413D08 | GACCTCCAGATGACCCAGTCTCCATCCTCCCTGTCTGCATCTGTAGGAGACAGA |
| | chain sequence | | light chain | GTCACCATCACTTGCCGGGCAAGTCAGGGCATTAGAAATGATTTAGGCTGGTAT |
| | | | | CAGCAGAAACCAGGGAAAGCCCCTAAGCGCCTGATCTATGCTGCATCCAGTTTG |
| | | | | CAAAGTGGGGTCCCATCAAGGTTCAGCGGCAGTGGATCTGGGACAGAATTCACT |
| | | | | CTCACAATCAGCAGCCTGCAGCCTGAAGATTTTGCAACTTATTACTGTCTACAGC |
| | | | | ATAATAGTTACCCTCGGACGTTCGGCCAAGGGACCAAGGTGGAAATCAAACGTA |
| | | | | CGGTGGCCGCTCCCTCCGTGTTCATCTTCCCACCTTCCGACGAGCAGCTGAAGT |
| | | | | CCGGCACCGCTTCTGTCGTGTGCCTGCTGAACAACTTCTACCCCCGCGAGGCCA |
| | | | | AGGTGCAGTGGAAGGTGGACAACGCCCTGCAGTCCGGCAACTCCCAGGAATCCG |
| | | | | TGACCGAGCAGGACTCCAAGGACAGCACCTACTCCCTGTCCTCCACCCTGACCC |
| | | | | TGTCCAAGGCCGACTACGAGAAGCACAAGGTGTACGCCTGCGAAGTGACCCACC |
| | | | | AGGGCCTGTCTAGCCCCGTGACCAAGTCTTTCAACCGGGGCGAGTGT |
| 152 | 386H03-CDRH1 | | Amino acid sequence of CDRH1 | GGSISSSDW |
| | (IMGT) | | of 386H03 using IMGT | |
| 153 | 386H03-CDRH2 | | Amino acid sequence of CDRH2 | IFHSGNT |
| | (IMGT) | | of 386H03 using IMGT | |
| 154 | 386H03-CDRH3 | | Amino acid sequence of CDRH3 | VRDGSGSY |
| | (IMGT) | | of 386H03 using IMGT | |
| 155 | 386H03-CDRH1 | | Amino acid sequence of CDRH1 | SSDWWS |
| | (Kabat) | | of 386H03 using Kabat | |
| 156 | 386H03-CDRH2 | | Amino acid sequence of CDRH2 | EIFHSGNTNYNPSLKS |
| | (Kabat) | | of 386H03 using Kabat | |
| 157 | 386H03-CDRH3 | | Amino acid sequence of CDRH3 | DGSGSY |
| | (Kabat) | | of 386H03 using Kabat | |
| 158 | 386H03-Heavy chain | | Amino acid sequence of V_{H} of | QVQLQESGPGLVKPSGTLSLTCAVSGGSISSSDWWSWVRQPPGKGLEWIGEIFHS |
| | variable region | | 386H03 | GNTNYNPSLKSRVTISVDKSKNQISLRLNSVTAADTAVYYCVRDGSGSYWGQGTL |
| | | | | VTVSS |
| 159 | 386H03-Heavy chain | | Nucleic acid sequence of V_{H} of | CAGGTGCAGCTGCAGGAGTCGGGCCCAGGACTGGTGAAGCCTTCGGGGACCCT |
| | variable region | | 386H03 | GTCCCTCACCTGCGCTGICTCTGGTGGCTCCATCAGCAGTAGTGACTGGTGGAG |
| | | | | TTGGGTCCGCCAGCCCCCAGGGAAGGGGCTGGAGTGGATTGGGGAAATCTTTC |
| | | | | ATAGTGGGAACACCAACTACAACCCGTCCCTCAAGAGTCGAGTCACCATATCAGT |
| | | | | AGACAAGTCCAAGAACCAGATCTCCCTGAGGCTGAACTCTGTGACCGCCGCGGA |
| | | | | CACGGCCGTGTATTACTGTGTGAGAGATGGTTCGGGGAGTTACTGGGGCCAGG |
| | | | | GAACCCTGGTCACCGTCTCCTCAG |
| 160 | 386H03-full heavy | | Amino acid sequence of 386H03 | QVQLQESGPGLVKPSGTLSLTCAVSGGSISSSDWWSWVRQPPGKGLEWIGEIFHS |
| | chain sequence | | heavy chain | GNTNYNPSLKSRVTISVDKSKNQISLRLNSVTAADTAVYYCVRDGSGSYWGQGTL |
| | | | | VTVSSASTKGPSVFPLAPSSKSTSGGTAALGCLVKDYFPEPVTVSWNSGALTSGVH |
| | | | | TFPAVLQSSGLYSLSSVVTVPSSSLGTQTYICNVNHKPSNTKVDKKVEPKSCDKTHT |
| | | | | CPPCPAPELLGGPSVFLFPPKPKDTLMISRTPEVTCVVVDVSHEDPEVKFNWYVDG |
| | | | | VEVHNAKTKPREEQYNSTYRVVSVLTVLHQDWLNGKEYKCKVSNKALPAPIEKTIS |
| | | | | KAKGQPREPQVYTLPPSRDELTKNQVSLTCLVKGFYPSDIAVEWESNGQPENNYKT |
| | | | | TPPVLDSDGSFFLYSKLTVDKSRWQQGNVFSCSVMHEALHNHYTQKSLSLSPGK |
| 161 | 386H03-full heavy | | Nucleic acid sequence of 386H03 | CAGGTGCAGCTGCAGGAGTCGGGCCCAGGACTGGTGAAGCCTTCGGGGACCCT |
| | chain sequence | | heavy chain | GTCCCTCACCTGCGCTGTCTCTGGTGGCTCCATCAGCAGTAGTGACTGGTGGAG |
| | | | | TTGGGTCCGCCAGCCCCCAGGGAAGGGGCTGGAGIGGATTGGGGAAATCTTTC |
| | | | | ATAGTGGGAACACCAACTACAACCCGTCCCTCAAGAGTCGAGTCACCATATCAGT |
| | | | | AGACAAGTCCAAGAACCAGATCTCCCTGAGGCTGAACTCTGTGACCGCCGCGGA |
| | | | | CACGGCCGTGTATTACTGTGTGAGAGATGGTTCGGGGAGTTACTGGGGCCAGG |
| | | | | GAACCCTGGTCACCGTCTCCTCAGCCAGCACCAAGGGCCCCTCTGTGTTCCCTC |
| | | | | TGGCCCCTTCCAGCAAGTCCACCTCTGGCGGAACAGCCGCTCTGGGCTGCCTCG |
| | | | | TGAAGGACTACTTCCCCGAGCCTGTGACCGTGTCCTGGAACTCTGGCGCTCTGA |
| | | | | CCAGCGGAGTGCACACCTTCCCTGCTGTGCTGCAGTCCTCCGGCCTGTACTCCC |
| | | | | TGTCCTCCGTCGTGACCGTGCCTTCCAGCTCTCTGGGCACCCAGACCTACATCT |
| | | | | GCAACGTGAACCACAAGCCCTCCAACACCAAGGTGGACAAGAAGGTGGAACCCA |
| | | | | AGTCCTGCGACAAGACCCACACCTGTCCCCCTTGTCCTGCCCCTGAACTGCTGG |
| | | | | GCGGACCTTCCGTGTTCCTGTTCCCCCCAAAGCCCAAGGACACCCTGATGATCT |
| | | | | CCCGGACCCCCGAAGTGACCTGCGTGGTGGTGGATGTGTCCCACGAGGACCCT |
| | | | | GAAGTGAAGTTCAATTGGTACGTGGACGGCGTGGAAGTGCACAACGCCAAGACC |
| | | | | AAGCCTAGAGAGGAACAGTACAACTCCACCTACCGGGTGGTGTCCGTGCTGACC |
| | | | | GTGCTGCACCAGGATTGGCTGAACGGCAAAGAGTACAAGTGCAAGGTGTCCAAC |
| | | | | AAGGCCCTGCCTGCCCCCATCGAAAAGACCATCTCCAAGGCCAAGGGCCAGCCC |
| | | | | CGGGAACCCCAGGTGTACACACTGCCCCCTAGCAGGGACGAGCTGACCAAGAAC |
| | | | | CAGGTGTCCCTGACCTGTCTCGTGAAAGGCTTCTACCCCTCCGATATCGCCGTG |
| | | | | GAATGGGAGTCCAACGGCCAGCCTGAGAACAACTACAAGACCACCCCCCCTGTG |
| | | | | CTGGACTCCGACGGCTCATTCTTCCTGTACAGCAAGCTGACAGTGGACAAGTCC |
| | | | | CGGTGGCAGCAGGGCAACGTGTTCTCCTGCTCCGTGATGCACGAGGCCCTGCAC |
| | | | | AACCACTACACCCAGAAGTCCCTGTCCCTGAGCCCCGGCAAG |
| 162 | 386H03-CDRL1 | | Amino acid sequence of CDRL1 | QSVLYSSNNKNY |
| | (IMGT) | | of 386H03 using IMGT | |
| 163 | 386H03-CDRL2 | | Amino acid sequence of CDRL2 | WAS |
| | (IMGT) | | of 386H03 using IMGT | |
| 164 | 386H03-CDRL3 | | Amino acid sequence of CDRL3 | QQYYSTRS |
| | (IMGT) | | of 386H03 using IMGT | |
| 165 | 386H03-CDRL1 | | Amino acid sequence of CDRL1 | KSSQSVLYSSNNKNYLA |
| | (Kabat) | | of 386H03 using Kabat | |
| 166 | 386H03-CDRL2 | | Amino acid sequence of CDRL2 | WASTRES |
| | (Kabat) | | of 386H03 using Kabat | |
| 167 | 386H03-CDRL3 | | Amino acid sequence of CDRL3 | QQYYSTRS |
| | (Kabat) | | of 386H03 using Kabat | |
| 168 | 386H03-Light chain | | Amino acid sequence of V_{L} of | DIVMTQSPDSLAVSLGERATINCKSSQSVLYSSNNKNYLAWYQQKPGQPPKLLIYW |
| | variable region | | 386H03 | ASTRESGVPDRFSGSGSGTDFTLTISSLQAEDVAVYYCQQYYSTRSFGQGTKLEIK |
| 169 | 386H03-Light chain | | Nucleic acid sequence of V_{L} of | GACATCGTGATGACCCAGTCTCCAGACTCCCTGGCTGTGTCTCTGGGCGAGAGG |
| | variable region | | 386H03 | GCCACCATCAACTGCAAGTCCAGCCAGAGTGTTTTATACAGCTCCAACAATAAGA |
| | | | | ACTACTTAGCTTGGTACCAGCAGAAACCAGGACAGCCTCCTAAACTGCTCATTTA |
| | | | | CTGGGCATCTACCCGGGAATCCGGGGTCCCTGACCGATTCAGTGGCAGCGGGT |
| | | | | CTGGGACAGATTTCACTCTCACCATCAGCAGCCTGCAGGCTGAAGATGTGGCAG |
| | | | | TTTATTACTGTCAGCAATATTATAGTACTCGCAGTTTTGGCCAGGGGACCAAGCT |
| | | | | GGAGATCAAAC |
| 170 | 386H03-full light | | Amino acid sequence of 386H03 | DIVMTQSPDSLAVSLGERATINCKSSQSVLYSSNNKNYLAWYQQKPGQPPKLLIYW |
| | chain sequence | | light chain | ASTRESGVPDRFSGSGSGTDFTLTISSLQAEDVAVYYCQQYYSTRSFGQGTKLEIK |
| | | | | RTVAAPSVFIFPPSDEQLKSGTASVVCLLNNFYPREAKVQWKVDNALQSGNSQESV |
| | | | | TEQDSKDSTYSLSSTLTLSKADYEKHKVYACEVTHQGLSSPVTKSFNRGEC |
| 171 | 386H03-full light | | Nucleic acid sequence of 386H03 | GACATCGTGATGACCCAGTCTCCAGACTCCCTGGCTGTGTCTCTGGGCGAGAGG |
| | chain sequence | | light chain | GCCACCATCAACTGCAAGTCCAGCCAGAGTGTTTTATACAGCTCCAACAATAAGA |
| | | | | ACTACTTAGATGGTACCAGCAGAAACCAGGACAGCCTCCTAAACTGCTCATTTA |
| | | | | CTGGGCATCTACCCGGGAATCCGGGGTCCCTGACCGATTCAGTGGCAGCGGGT |
| | | | | CTGGGACAGATTTCACTCTCACCATCAGCAGCCTGCAGGCTGAAGATGTGGCAG |
| | | | | TTTATTACTGTCAGCAATATTATAGTACTCGCAGTTTTGGCCAGGGGACCAAGCT |
| | | | | GGAGATCAAACGTACGGTGGCCGCTCCCTCCGTGTTCATCTTCCCACCTTCCGA |
| | | | | CGAGCAGCTGAAGTCCGGCACCGCTTCTGTCGTGTGCCTGCTGAACAACTTCTA |
| | | | | CCCCCGCGAGGCCAAGGTGCAGTGGAAGGTGGACAACGCCCTGCAGTCCGGCA |
| | | | | ACTCCCAGGAATCCGTGACCGAGCAGGACTCCAAGGACAGCACCTACTCCCTGT |
| | | | | CCTCCACCCTGACCCTGTCCAAGGCCGACTACGAGAAGCACAAGGTGTACGCCT |
| | | | | GCGAAGTGACCCACCAGGGCCTGTCTAGCCCCGTGACCAAGTCTTTCAACCGGG |
| | | | | GCGAGTGT |
| 172 | 389A03-CDRH1 | | Amino acid sequence of CDRH1 | GGSISSSSYY |
| | (IMGT) | | of 389A03 using IMGT | |
| 173 | 389A03-CDRH2 | | Amino acid sequence of CDRH2 | IYSTGYT |
| | (IMGT) | | of 389A03 using IMGT | |
| 174 | 389A03-CDRH3 | | Amino acid sequence of CDRH3 | AISTAAGPEYFHR |
| | (IMGT) | | of 389A03 using IMGT | |
| 175 | 389A03-CDRH1 | | Amino acid sequence of CDRH1 | SSSYYCG |
| | (Kabat) | | of 389A03 using Kabat | |
| 176 | 389A03-CDRH2 | | Amino acid sequence of CDRH2 | SIYSTGYTYYNPSLKS |
| | (Kabat) | | of 389A03 using Kabat | |
| 177 | 389A03-CDRH3 | | Amino acid sequence of CDRH3 | STAAGPEYFHR |
| | (Kabat) | | of 389A03 using Kabat | |
| 178 | 389A03-Heavy chain | | Amino acid sequence of V_{H} of | QLQESGPGLVKPSETLSLTCTVSGGSISSSSYYCGWIRQPPGKGLDWIGSIYSTGYT |
| | variable region | | 389A03 | YYNPSLKSRVTISIDTSKNQFSCLILTSVTAADTAVYYCAISTAAGPEYFHRWGQGT |
| | | | | LVTVSS |
| 179 | 389A03-Heavy chain | | Nucleic acid sequence of V_{H} of | CAGCTGCAGGAGTCGGGCCCAGGCCTGGTGAAGCCTTCGGAGACCCTGTCCCTC |
| | variable region | | 389A03 | ACCTGCACTGTCTCTGGTGGCTCCATCAGCAGTAGTAGTTATTACTGCGGCTGG |
| | | | | ATCCGCCAGCCCCCTGGGAAGGGGCTGGACTGGATTGGGAGTATCTATTCTACT |
| | | | | GGGTACACCTACTACAACCCGTCCCTCAAGAGTCGAGTCACCATTTCCATAGACA |
| | | | | CGTCCAAGAACCAGTTCTCATGCCTGATACTGACCTCTGTGACCGCCGCAGACA |
| | | | | CGGCTGTGTATTACTGTGCGATAAGTACAGCAGCTGGCCCTGAATACTTCCATC |
| | | | | GCTGGGGCCAGGGCACCCTGGTCACCGTCTCCTCAG |
| 180 | 389A03-full heavy | | Amino acid sequence of 389A03 | QLQESGPGLVKPSETLSLTCTVSGGSISSSSYYCGWIRQPPGKGLDWIGSIYSTGYT |
| | chain sequence | | heavy chain | YYNPSLKSRVTISIDTSKNQFSCLTLTSVTAADTAVYYCAISTAAGPEYFHRWGQGT |
| | | | | LVTVSSASTKGPSVFPLAPSSKSTSGGTAALGCLVKDYFPEPVTVSWNSGALTSGVH |
| | | | | TFPAVLQSSGLYSLSSVVTVPSSSLGTQTYICNVNHKPSNTKVDKKVEPKSCDKTHT |
| | | | | CPPCPAPELLGGPSVFLFPPKPKDTLMISRTPEVTCVVVDVSHEDPEVKFNWYVDG |
| | | | | VEVHNAKTKPREEQYNSTYRVVSVLTVLHQDWLNGKEYKCKVSNKALPAPIEKTIS |
| | | | | KAKGQPREPQVYTLPPSRDELTKNQVSLTCLVKGFYPSDIAVEWESNGQPENNYKT |
| | | | | TPPVLDSDGSFFLYSKLTVDKSRWQQGNVFSCSVMHEALHNHYTQKSLSLSPGK |
| 181 | 389A03-full heavy | | Nucleic acid sequence of 389A03 | CAGCTGCAGGAGTCGGGCCCAGGCCTGGTGAAGCCTTCGGAGACCCTGTCCCTC |
| | chain sequence | | heavy chain | ACCTGCACTGTCTCTGGTGGCTCCATCAGCAGTAGTAGTTATTACTGCGGCTGG |
| | | | | ATCCGCCAGCCCCCTGGGAAGGGGCTGGACTGGATTGGGAGTATCTATTCTACT |
| | | | | GGGTACACCTACTACAACCCGTCCCTCAAGAGTCGAGTCACCATTTCCATAGACA |
| | | | | CGTCCAAGAACCAGTTCTCATGCCTGATACTGACCTCTGTGACCGCCGCAGACA |
| | | | | CGGCTGTGTATTACTGTGCGATAAGTACAGCAGCTGGCCCTGAATACTTCCATC |
| | | | | GCTGGGGCCAGGGCACCCTGGTCACCGTCTCCTCAGCCAGCACCAAGGGCCCCT |
| | | | | CTGTGTTCCCTCTGGCCCCTTCCAGCAAGTCCACCTCTGGCGGAACAGCCGCTC |
| | | | | TGGGCTGCCTCGTGAAGGACTACTTCCCCGAGCCTGTGACCGTGTCCTGGAACT |
| | | | | CTGGCGCTCTGACCAGCGGAGTGCACACCTTCCCTGCTGTGCTGCAGTCCTCCG |
| | | | | GCCTGTACTCCCTGTCCTCCGTCGTGACCGTGCCTTCCAGCTCTCTGGGCACCC |
| | | | | AGACCTACATCTGCAACGTGAACCACAAGCCCTCCAACACCAAGGTGGACAAGA |
| | | | | AGGTGGAACCCAAGTCCTGCGACAAGACCCACACCTGTCCCCCTTGTCCTGCCC |
| | | | | CTGAACTGCTGGGCGGACCTTCCGTGTTCCTGTTCCCCCCAAAGCCCAAGGACA |
| | | | | CCCTGATGATCTCCCGGACCCCCGAAGTGACCTGCGTGGTGGTGGATGTGTCCC |
| | | | | ACGAGGACCCTGAAGTGAAGTTCAATTGGTACGTGGACGGCGTGGAAGTGCACA |
| | | | | ACGCCAAGACCAAGCCTAGAGAGGAACAGTACAACTCCACCTACCGGGTGGTGT |
| | | | | CCGTGCTGACCGTGCTGCACCAGGATTGGCTGAACGGCAAAGAGTACAAGTGCA |
| | | | | AGGTGTCCAACAAGGCCCTGCCTGCCCCCATCGAAAAGACCATCTCCAAGGCCA |
| | | | | AGGGCCAGCCCCGGGAACCCCAGGTGTACACACTGCCCCCTAGCAGGGACGAGC |
| | | | | TGACCAAGAACCAGGTGTCCCTGACCTGTCTCGTGAAAGGCTTCTACCCCTCCG |
| | | | | ATATCGCCGTGGAATGGGAGTCCAACGGCCAGCCTGAGAACAACTACAAGACCA |
| | | | | CCCCCCCTGTGCTGGACTCCGACGGCTCATTCTTCCTGTACAGCAAGCTGACAG |
| | | | | TGGACAAGTCCCGGTGGCAGCAGGGCAACGTGTTCTCCTGCTCCGTGATGCACG |
| | | | | AGGCCCTGCACAACCACTACACCCAGAAGTCCCTGTCCCTGAGCCCCGGCAAG |
| 182 | 389A03-CDRL1 | | Amino acid sequence of CDRL1 | QSVLYSSNSKNF |
| | (IMGT) | | of 389A03 using IMGT | |
| 183 | 389A03-CDRL2 | | Amino acid sequence of CDRL2 | WAS |
| | (IMGT) | | of 389A03 using IMGT | |
| 184 | 389A03-CDRL3 | | Amino acid sequence of CDRL3 | QQYYSTPRT |
| | (IMGT) | | of 389A03 using IMGT | |
| 185 | 389A03-CDRL1 | | Amino acid sequence of CDRL1 | KSSQSVLYSSNSKNFLA |
| | (Kabat) | | of 389A03 using Kabat | |
| 186 | 389A03-CDRL2 | | Amino acid sequence of CDRL2 | WASTRGS |
| | (Kabat) | | of 389A03 using Kabat | |
| 187 | 389A03-CDRL3 | | Amino acid sequence of CDRL3 | QQYYSTPRT |
| | (Kabat) | | of 389A03 using Kabat | |
| 188 | 389A03-Light chain | | Amino acid sequence of V_{L} of | DIVMTQSPDSLAVSLGERATINCKSSQSVLYSSNSKNFLAWYQQKPGQPPKLFIYW |
| | variable region | | 389A03 | ASTRGSGVPDRISGSGSGTDFNLTISSLQAEDVAVYYCQQYYSTPRTFGQGTKVEI |
| | | | | K |
| 189 | 389A03-Light chain | | Nucleic acid sequence of V_{L} of | GACATCGTGATGACCCAGTCTCCAGACTCCCTGGCTGTGTCTCTGGGCGAGAGG |
| | variable region | | 389A03 | GCCACCATCAACTGCAAGTCCAGCCAGAGTGTTTTATACAGCTCCAACAGTAAGA |
| | | | | ACTTCTTAGCTTGGTACCAGCAGAAACCGGGACAGCCTCCTAAGCTGTTCATTTA |
| | | | | CTGGGCATCTACCCGGGGATCCGGGGTCCCTGACCGAATCAGTGGCAGCGGGT |
| | | | | CTGGGACAGATTTCAATCTCACCATCAGCAGCCTGCAGGCTGAAGATGTGGCAG |
| | | | | TTTATTACTGTCAACAATATTATAGTACTCCTCGGACGTTCGGCCAAGGGACCAA |
| | | | | GGTGGAGATCAAAC |
| 190 | 389A03-full light | | Amino acid sequence of 389A03 | DIVMTQSPDSLAVSLGERATINCKSSQSVLYSSNSKNFLAWYQQKPGQPPKLFIYW |
| | chain sequence | | light chain | ASTRGSGVPDRISGSGSGTDFNLTISSLQAEDVAVYYCQQYYSTPRTFGQGTKVEI |
| | | | | KRTVAAPSVFIFPPSDEQLKSGTASVVCLLNNFYPREAKVQWKVDNALQSGNSQES |
| | | | | VTEQDSKDSTYSLSSTLTLSKADYEKHKVYACEVTHQGLSSPVTKSFNRGEC |
| 191 | 389A03-full light | | Nucleic acid sequence of 389A03 | GACATCGTGATGACCCAGTCTCCAGACTCCCTGGCTGIGTCTCTGGGCGAGAGG |
| | chain sequence | | light chain | GCCACCATCAACTGCAAGTCCAGCCAGAGTGTTTTATACAGCTCCAACAGTAAGA |
| | | | | ACTTCTTAGCTTGGTACCAGCAGAAACCGGGACAGCCTCCTAAGCTGTTCATTTA |
| | | | | CTGGGCATCTACCCGGGGATCCGGGGTCCCTGACCGAATCAGTGGCAGCGGGT |
| | | | | CTGGGACAGATTTCAATCTCACCATCAGCAGCCTGCAGGCTGAAGATGTGGCAG |
| | | | | TTTATTACTGTCAACAATATTATAGTACTCCTCGGACGTTCGGCCAAGGGACCAA |
| | | | | GGTGGAGATCAAACGTACGGTGGCCGCTCCCTCCGTGTTCATCTTCCCACCTTC |
| | | | | CGACGAGCAGCTGAAGTCCGGCACCGCTTCTGTCGTGTGCCTGCTGAACAACTT |
| | | | | CTACCCCCGCGAGGCCAAGGTGCAGTGGAAGGTGGACAACGCCCTGCAGTCCG |
| | | | | GCAACTCCCAGGAATCCGTGACCGAGCAGGACTCCAAGGACAGCACCTACTCCC |
| | | | | TGTCCTCCACCCTGACCCTGTCCAAGGCCGACTACGAGAAGCACAAGGTGTACG |
| | | | | CCTGCGAAGTGACCCACCAGGGCCTGTCTAGCCCCGTGACCAAGTCTTTCAACC |
| | | | | GGGGCGAGTGT |
| 192 | Human | IGHG4* | Heavy Chain Constant Region | gcttccaccaagggcccatccgtcttccccctggcgccctgctccaggagcacctccgagagcacagccg |
| | IgG4 heavy | 01 & | Nucleotide Sequence | ccctgggctgcctggtcaaggactacttccccgaaccggtgacggtgtcgtggaactcaggcgccctgac |
| | chain | IGHG4* | | cagcggcgtgcacaccttcccggctgtcctacagtcctcaggactctactccctcagcagcgtggtgaccg |
| | constant | 04 | | tgccctccagcagcttgggcacgaagacctacacctgcaacgtagatcacaagcccagcaacaccaagg |
| | region #1 | | | tggacaagagagttgagtccaaatatggtcccccatgcccatcatgcccagcacctgagttcctgggggg |
| | | | | accatcagtcttcctgttccccccaaaacccaaggacactctcatgatctcccggacccctgaggtcacgtg |
| | | | | cgtggtggtggacgtgagccaggaagaccccgaggtccagttcaactggtacgtggatggcgtggagg |
| | | | | tgcataatgccaagacaaagccgcgggaggagcagttcaacagcacgtaccgtgtggtcagcgtcctca |
| | | | | ccgtcctgcaccaggactggctgaacggcaaggagtacaagtgcaaggtctccaacaaaggcctcccgt |
| | | | | cctccatcgagaaaaccatctccaaagccaaagggcagccccgagagccacaggtgtacaccctgcccc |
| | | | | catcccaggaggagatgaccaagaaccaggtcagcctgacctgcctggtcaaaggcttctaccccagcg |
| | | | | acatcgccgtggagtgggagagcaatgggcagccggagaacaactacaagaccacgcctcccgtgctg |
| | | | | gactccgacggctccttcttcctctacagcaggctaaccgtggacaagagcaggtggcaggaggggaat |
| | | | | gtcttctcatgctccgtgatgcatgaggctctgcacaaccactacacacagaagagcctctccctgtctctg |
| | | | | ggtaaa |
| 193 | | | Heavy Chain Constant Region | ASTKGPSVFPLAPCSRSTSESTAALGCLVKDYFPEPVTVSWNSGALTSGVHTFPAVL |
| | | | Amino Acid Sequence | QSSGLYSLSSVVTVPSSSLGTKTYTCNVDHKPSNTKVDKRVESKYGPPCPSCPAPEF |
| | | | | LGGPSVFLFPPKPKDILMISRTPEVTCVVVDVSQEDPEVQFNWYVDGVEVHNAKTK |
| | | | | PREEQFNSTYRVVSVLTVLHQDWLNGKEYKCKVSNKGLPSSIEKTISKAKGQPREP |
| | | | | QVYTLPPSQEEMTKNQVSLTCLVKGFYPSDIAVEWESNGQPENNYKTIPPVLDSD |
| | | | | GSFFLYSRLTVDKSRWQEGNVFSCSVMHEALHNHYTQKSLSLSLGK |
| 194 | Human | IGHG4* | Heavy Chain Constant Region | gcttccaccaagggcccatccgtcttccccctggcgccctgctccaggagcacctccgagagcacagccg |
| | IgG4 heavy | 02 | Nucleotide Sequence | ccctgggctgcctggtcaaggactacttccccgaaccggtgacggtgtcgtggaactcaggcgccctgac |
| | chain | | | cagcggcgtgcacaccttcccggctgtcctacagtcctcaggactctactccctcagcagcgtggtgaccg |
| | constant | | | tgccctccagcagcttgggcacgaagacctacacctgcaacgtagatcacaagcccagcaacaccaagg |
| | region #2 | | | tggacaagagagttgagtccaaatatggtcccccgtgcccatcatgcccagcacctgagttcctgggggg |
| | | | | accatcagtcttcctgttccccccaaaacccaaggacactctcatgatctcccggacccctgaggtcacgtg |
| | | | | cgtggtggtggacgtgagccaggaagaccccgaggtccagttcaactggtacgtggatggcgtggagg |
| | | | | tgcataatgccaagacaaagccgcgggaggagcagttcaacagcacgtaccgtgtggtcagcgtcctca |
| | | | | ccgtcgtgcaccaggactggctgaacggcaaggagtacaagtgcaaggtctccaacaaaggcctcccg |
| | | | | tcctccatcgagaaaaccatctccaaagccaaagggcagccccgagagccacaggtgtacaccctgccc |
| | | | | ccatcccaggaggagatgaccaagaaccaggtcagcctgacctgcctggtcaaaggcttctaccccagc |
| | | | | gacatcgccgtggagtgggagagcaatgggcagccggagaacaactacaagaccacgcctcccgtgct |
| | | | | ggactccgacggctccttcttcctctacagcaggctaaccgtggacaagagcaggtggcaggagggga |
| | | | | atgtcttctcatgctccgtgatgcatgaggctctgcacaaccactacacgcagaagagcctctccctgtctc |
| | | | | tgggtaaa |
| 195 | | | Heavy Chain Constant Region | ASTKGPSVFPLAPCSRSTSESTAALGCLVKDYFPEPVTVSWNSGALTSGVHTFPAVL |
| | | | Amino Acid Sequence | QSSGLYSLSSVVTVPSSSLGTKTYTCNVDHKPSNTKVDKRVESKYGPPCPSCPAPEF |
| | | | | LGGPSVFLFPPKPKDILMISRTPEVTCVVVDVSQEDPEVQFNWYVDGVEVHNAKTK |
| | | | | PREEQFNSTYRWSVLTVVHQDWLNGKEYKCKVSNKGLPSSIEKTISKAKGQPREP |
| | | | | QVYTLPPSQEEMTKNQVSLTCLVKGFYPSDIAVEWESNGQPENNYKTTPPVLDSD |
| | | | | GSFFLYSRLTVDKSRWQEGNVFSCSVMHEALHNHYTQKSLSLSLGK |
| 196 | Human | IGHG4* | Heavy Chain Constant Region | gcttccaccaagggcccatccgtcttccccctggcgccctgctccaggagcacctccgagagcacagccg |
| | IgG4 heavy | 03 | Nucleotide Sequence | ccctgggctgcctggtcaaggactacttccccgaaccggtgacggtgtcgtggaactcaggcgccctgac |
| | chain | | | cagcggcgtgcacaccttcccggctgtcctacagtcctcaggactctactccctcagcagcgtggtgaccg |
| | constant | | | tgccctccagcagcttgggcacgaagacctacacctgcaacgtagatcacaagcccagcaacaccaagg |
| | region #3 | | | tggacaagagagttgagtccaaatatggtcccccatgcccatcatgcccagcacctgagttcctgggggg |
| | | | | accatcagtcttcctgttccccccaaaacccaaggacactctcatgatctcccggacccctgaggtcacgtg |
| | | | | cgtggtggtggacgtgagccaggaagaccccgaggtccagttcaactggtacgtggatggcgtggagg |
| | | | | tgcataatgccaagacaaagccgcgggaggagcagttcaacagcacgtaccgtgtggtcagcgtcctca |
| | | | | ccgtcctgcaccaggactggctgaacggcaaggagtacaagtgcaaggtctccaacaaaggcctcccgt |
| | | | | cctccatcgagaaaaccatctccaaagccaaagggcagccccgagagccacaggtgtacaccctgcccc |
| | | | | catcccaggaggagatgaccaagaaccaggtcagcctgacctgcctggtcaaaggcttctaccccagcg |
| | | | | acatcgccgtggagtgggagagcaatgggcagccggagaacaactacaagaccacgcctcccgtgctg |
| | | | | gactccgacggctccttcttcctctacagcaagctcaccgtggacaagagcaggtggcaggaggggaac |
| | | | | gtcttctcatgctccgtgatgcatgaggctctgcacaaccactacacgcagaagagcctctccctgtctctg |
| | | | | ggtaaa |
| 197 | | | Heavy Chain Constant Region | ASTKGPSVFPLAPCSRSTSESTAALGCLVKDYFPEPVTVSWNSGALTSGVHTFPAVL |
| | | | Amino Acid Sequence | QSSGLYSLSSVVTVPSSSLGTKTYTCNVDHKPSNIKVDKRVESKYGPPCPSCPAPEF |
| | | | | LGGPSVFLFPPKPKDILMISRTPEVTCVVVDVSQEDPEVQFNWYVDGVEVHNAKTK |
| | | | | PREEQFNSTYRVVSVLTVLHQDWLNGKEYKCKVSNKGLPSSIEKTISKAKGQPREP |
| | | | | QVYTLPPSQEEMTKNQVSLTCLVKGFYPSDIAVEWESNGQPENNYKTTPPVLDSD |
| | | | | GSFFLYSKLTVDKSRWQEGNVFSCSVMHEALHNHYTQKSLSLSLGK |
| 198 | IgG4 heavy | IGHG4- | Heavy Chain Constant Region | gcctccaccaagggcccatccgtcttccccctggcgccctgctccaggagcacctccgagagcacggccg |
| | chain | PE | Nucleotide Sequence-Synthetic | ccctgggctgcctggtcaaggactacttccccgaaccagtgacggtgtcgtggaactcaggcgccctgac |
| | constant | | Version A | cagcggcgtgcacaccttcccggctgtcctacagtcctcaggactctactccctcagcagcgtggtgaccg |
| | region- | | | tgccctccagcagcttgggcacgaagacctacacctgcaacgtagatcacaagcccagcaacaccaagg |
| | IgG4-PE | | | tggacaagagagttgagtccaaatatggtcccccatgcccaccatgcccagcgcctgaatttgaggggg |
| | | | | gaccatcagtcttcctgttccccccaaaacccaaggacactctcatgatctcccggacccctgaggtcacgt |
| | | | | gcgtggtggtggacgtgagccaggaagaccccgaggtccagttcaactggtacgtggatggcgtggag |
| | | | | gtgcataatgccaagacaaagccgcgggaggagcagttcaacagcacgtaccgtgtggtcagcgtcctc |
| | | | | accgtcctgcaccaggactggctgaacggcaaggagtacaagtgcaaggtctccaacaaaggcctccc |
| | | | | gtcatcgatcgagaaaaccatctccaaagccaaagggcagccccgagagccacaggtgtacaccctgc |
| | | | | ccccatcccaggaggagatgaccaagaaccaggtcagcctgacctgcctggtcaaaggcttctacccca |
| | | | | gcgacatcgccgtggagtgggagagcaatgggcagccggagaacaactacaagaccacgcctcccgt |
| | | | | gctggactccgacggatccttcttcctctacagcaggctaaccgtggacaagagcaggtggcaggaggg |
| | | | | gaatgtcttctcatgctccgtgatgcatgaggctctgcacaaccactacacacagaagagcctctccctgtc |
| | | | | tctgggtaaa |
| 199 | IgG4 heavy | | Heavy Chain Constant Region | ASTKGPSVFPLAPCSRSTSESTAALGCLVKDYFPEPVTVSWNSGALTSGVHTFPAVL |
| | chain | | Amino Acid Sequence-Encoded | QSSGLYSLSSVVTVPSSSLGTKTYTCNVDHKPSNTKVDKRVESKYGPPCPPCPAPEF |
| | constant | | by Synthetic Version A, B & C | EGGPSVFLFPPKPKDTLMISRTPEVTCVVVDVSQEDPEVQFNWYVDGVEVHNAKT |
| | region- | | (Two residues that differ from | KPREEQFNSTYRWSVLTVLHQDWLNGKEYKCKVSNKGLPSSIEKTISKAKGQPRE |
| | IgG4-PE | | the wild-type sequence are | PQVYTLPPSQEEMTKNQVSLTCLVKGFYPSDIAVEWESNGQPENNYKTTPPVLDSD |
| | | | identified in bold) | GSFFLYSRLTVDKSRWQEGNVFSCSVMHEALHNHYTQKSLSLSLGK |
| 200 | IgG4 heavy | | Heavy Chain Constant Region | Gcctccaccaagggacctagcgtgttccctctcgccccctgttccaggtccacaagcgagtccaccgctgc |
| | chain | | Nucleotide Sequence-Synthetic | cctcggctgtctggtgaaagactactttcccgagcccgtgaccgtctcctggaatagcggagccctgacct |
| | constant | | Version B | ccggcgtgcacacatttcccgccgtgctgcagagcagcggactgtatagcctgagcagcgtggtgaccgt |
| | region- | | | gcccagctccagcctcggcaccaaaacctacacctgcaacgtggaccacaagccctccaacaccaaggt |
| | IgG4-PE | | | ggacaagcgggtggagagcaagtacggccccccttgccctccttgtcctgcccctgagttcgagggagg |
| | | | | accctccgtgttcctgtttccccccaaacccaaggacaccctgatgatctcccggacacccgaggtgacct |
| | | | | gtgtggtcgtggacgtcagccaggaggaccccgaggtgcagttcaactggtatgtggacggcgtggag |
| | | | | gtgcacaatgccaaaaccaagcccagggaggagcagttcaattccacctacagggtggtgagcgtgct |
| | | | | gaccgtcctgcatcaggattggctgaacggcaaggagtacaagtgcaaggtgtccaacaagggactgc |
| | | | | ccagctccatcgagaagaccatcagcaaggctaagggccagccgagggagccccaggtgtataccctg |
| | | | | cctcctagccaggaagagatgaccaagaaccaagtgtccctgacctgcctggtgaagggattctacccct |
| | | | | ccgacatcgccgtggagtgggagagcaatggccagcccgagaacaactacaaaacaacccctcccgtg |
| | | | | ctcgatagcgacggcagcttctttctctacagccggctgacagtggacaagagcaggtggcaggagggc |
| | | | | aacgtgttctcctgttccgtgatgcacgaggccctgcacaatcactacacccagaagagcctctccctgtcc |
| | | | | ctgggcaag |
| 201 | IgG4 heavy | | Heavy Chain Constant Region | gccagcaccaagggcccttccgtgttccccctggccccttgcagcaggagcacctccgaatccacagctg |
| | chain | | Nucleotide Sequence-Synthetic | ccctgggctgtctggtgaaggactactttcccgagcccgtgaccgtgagctggaacagcggcgctctgac |
| | constant | | Version C | atccggcgtccacacctttcctgccgtcctgcagtcctccggcctctactccctgtcctccgtggtgaccgtg |
| | region- | | | cctagctcctccctcggcaccaagacctacacctgtaacgtggaccacaaaccctccaacaccaaggtgg |
| | IgG4-PE | | | acaaacgggtcgagagcaagtacggccctccctgccctccttgtcctgcccccgagttcgaaggcggacc |
| | | | | cagcgtgttcctgttccctcctaagcccaaggacaccctcatgatcagccggacacccgaggtgacctgc |
| | | | | gtggtggtggatgtgagccaggaggaccctgaggtccagttcaactggtatgtggatggcgtggaggtg |
| | | | | cacaacgccaagacaaagccccgggaagagcagttcaactccacctacagggtggtcagcgtgctgac |
| | | | | cgtgctgcatcaggactggctgaacggcaaggagtacaagtgcaaggtcagcaataagggactgccca |
| | | | | gcagcatcgagaagaccatctccaaggctaaaggccagccccgggaacctcaggtgtacaccctgcctc |
| | | | | ccagccaggaggagatgaccaagaaccaggtgagcctgacctgcctggtgaagggattctacccttccg |
| | | | | acatcgccgtggagtgggagtccaacggccagcccgagaacaattataagaccacccctcccgtcctcg |
| | | | | acagcgacggatccttctttctgtactccaggctgaccgtggataagtccaggtggcaggaaggcaacgt |
| | | | | gttcagctgctccgtgatgcacgaggccctgcacaatcactacacccagaagtccctgagcctgtccctgg |
| | | | | gaaag |
| 202 | IgG4 heavy | | Heavy Chain Constant Region | gcctccaccaagggcccatccgtcttccccctggcgccctgctccaggagcacctccgagagcacggccg |
| | chain | | Nucleotide Sequence | ccctgggctgcctggtcaaggactacttccccgaaccagtgacggtgtcgtggaactcaggcgccctgac |
| | constant | | | cagcggcgtgcacaccttcccggctgtcctacagtcctcaggactctactccctcagcagcgtggtgaccg |
| | region- | | | tgccctccagcagcttgggcacgaagacctacacctgcaacgtagatcacaagcccagcaacaccaagg |
| | inactivated | | | tggacaagagagttgagtccaaatatggtcccccatgcccaccatgcccagcgcctccagttgcggggg |
| | | | | gaccatcagtcttcctgttccccccaaaacccaaggacactctcatgatctcccggacccctgaggtcacgt |
| | | | | gcgtggtggtggacgtgagccaggaagaccccgaggtccagttcaactggtacgtggatggcgtggag |
| | | | | gtgcataatgccaagacaaagccgcgggaggagcagttcaacagcacgtaccgtgtggtcagcgtcctc |
| | | | | accgtcctgcaccaggactggctgaacggcaaggagtacaagtgcaaggtctccaacaaaggcctccc |
| | | | | gtcatcgatcgagaaaaccatctccaaagccaaagggcagccccgagagccacaggtgtacaccctgc |
| | | | | ccccatcccaggaggagatgaccaagaaccaggtcagcctgacctgcctggtcaaaggcttctacccca |
| | | | | gcgacatcgccgtggagtgggagagcaatgggcagccggagaacaactacaagaccacgcctcccgt |
| | | | | gctggactccgacggatccttcttcctctacagcaggctaaccgtggacaagagcaggtggcaggaggg |
| | | | | gaatgtcttctcatgctccgtgatgcatgaggctctgcacaaccactacacacagaagagcctctccctgtc |
| | | | | tctgggtaaa |
| 203 | | | Heavy Chain Constant Region | ASTKGPSVFPLAPCSRSTSESTAALGCLVKDYFPEPVTVSWNSGALTSGVHTFPAVL |
| | | | Amino Acid Sequence | QSSGLYSLSSVVTVPSSSLGTKTYTCNVDHKPSNTKVDKRVESKYGPPCPPCPAPP |
| | | | (inactivating mutations from | VAGGPSVFLFPPKPKDTLMISRTPEVTCVVVDVSQEDPEVQFNWYVDGVEVHNAK |
| | | | human WT IgG4 shown in bold) | TKPREEQFNSTYRWSVLTVLHQDWLNGKEYKCKVSNKGLPSSIEKTISKAKGQPR |
| | | | | EPQVYTLPPSQEEMTKNQVSLTCLVKGFYPSDIAVEWESNGQPENNYKTTPPVLDS |
| | | | | DGSFFLYSRLTVDKSRWQEGNVFSCSVMHEALHNHYTQKSLSLSLGK |
| 204 | Disabled | Disabled | Heavy Chain Constant Region | gcctccaccaagggcccatcggtcttccccctggcaccctcctccaagagcacctctgggggcacagcgg |
| | Human | IGHG1 | Nucleotide Sequence | ccctgggctgcctggtcaaggactacttccccgaaccggtgacggtgtcgtggaactcaggcgccctgac |
| | IgG1 heavy | | | cagcggcgtgcacaccttcccggctgtcctacagtcctcaggactctactccctcagcagcgtggtgaccg |
| | chain | | | tgccctccagcagcttgggcacccagacctacatctgcaacgtgaatcacaagcccagcaacaccaagg |
| | constant | | | tggacaagaaagtggagcccaaatcttgtgacaaaactcacacatgcccaccgtgcccagcacctgaac |
| | region | | | tcgcgggggcaccgtcagtcttcctcttccccccaaaacccaaggacaccctcatgatctcccggacccct |
| | | | | gaggtcacatgcgtggtggtggacgtgagccacgaagaccctgaggtcaagttcaactggtacgtggac |
| | | | | ggcgtggaggtgcataatgccaagacaaagccgcgggaggagcagtacaacagcacgtaccgtgtgg |
| | | | | tcagcgtcctcaccgtcctgcaccaggactggctgaatggcaaggagtacaagtgcaaggtctccaaca |
| | | | | aagccctcccagcccccatcgagaaaaccatctccaaagccaaagggcagccccgagaaccacaggtg |
| | | | | tacaccctgcccccatcccgggatgagctgaccaagaaccaggtcagcctgacctgcctggtcaaaggct |
| | | | | tctatcccagcgacatcgccgtggagtgggagagcaatgggcagccggagaacaactacaagaccac |
| | | | | gcctcccgtgctggactccgacggctccttcttcctctacagcaagctcaccgtggacaagagcaggtggc |
| | | | | agcaggggaacgtcttctcatgctccgtgatgcatgaggctctgcacaaccactacacgcagaagagcct |
| | | | | ctccctgtctccgggtaaa |
| 205 | | | Heavy Chain Constant Region | ASTKGPSVFPLAPSSKSTSGGTAALGCLVKDYFPEPVTVSWNSGALTSGVHTFPAVL |
| | | | Amino Acid Sequence (Two | QSSGLYSLSSVVTVPSSSLGTQTYICNVNHKPSNTKVDKKVEPKSCDKTHTCPPCP |
| | | | residues that differ from the | APELAGAPSVFLFPPKPKDTLMISRTPEVTCVVVDVSHEDPEVKFNWYVDGVEVHN |
| | | | wild-type sequence are | AKTKPREEQYNSTYRWSVLTVLHQDWLNGKEYKCKVSNKALPAPIEKTISKAKGQ |
| | | | identified in bold) | PREPQVYTLPPSRDELTKNQVSLTCLVKGFYPSDIAVEWESNGQPENNYKTTPPVL |
| | | | | DSDGSFFLYSKLTVDKSRWQQGNVFSCSVMHEALHNHYTQKSLSLSPGK |
| 206 | Human Cκ | IGKC*01 | Cκ Light Chain Constant Region | cgtacggtggccgctccctccgtgttcatcttcccaccttccgacgagcagctgaagtccggcaccgcttct |
| | constant | | Nucleotide Sequence | gtcgtgtgcctgctgaacaacttctacccccgcgaggccaaggtgcagtggaaggtggacaacgccctg |
| | region | | | cagtccggcaactcccaggaatccgtgaccgagcaggactccaaggacagcacctactccctgtcctcca |
| | | | | ccctgaccctgtccaaggccgactacgagaagcacaaggtgtacgcctgcgaagtgacccaccagggc |
| | | | | ctgtctagccccgtgaccaagtctttcaaccggggcgagtgt |
| 207 | | | Cκ Light Chain Constant Region | RTVAAPSVFIFPPSDEQLKSGTASWCLLNNFYPREAKVQWKVDNALQSGNSQESV |
| | | | Amino Acid Sequence | TEQDSKDSTYSLSSTLTLSKADYEKHKVYACEVTHQGLSSPVTKSFNRGEC |
| 208 | Human Cκ | IGKC*02 | Cκ Light Chain Constant Region | cgaactgtggctgcaccatctgtcttcatcttcccgccatctgatgagcagttgaaatctggaactgcctctg |
| | constant | | Nucleotide Sequence | ttgtgtgcctgctgaataacttctatcccagagaggccaaagtacagtggaaggtggataacgccctcca |
| | region | | | atcgggtaactcccaggagagtgtcacagagcaggagagcaaggacagcacctacagcctcagcagc |
| | | | | accctgacgctgagcaaagcagactacgagaaacacaaagtctacgccggcgaagtcacccatcaggg |
| | | | | cctgagctcgcccgtcacaaagagcttcaacaggggagagtgt |
| 209 | | | Cκ Light Chain Constant Region | RTVAAPSVFIFPPSDEQLKSGTASWCLLNNFYPREAKVQWINDNALQSGNSQESV |
| | | | Amino Acid Sequence | TEQESKDSTYSLSSTLTLSKADYEKHKVYAGEVTHQGLSSPVTKSFNRGEC |
| 210 | Human Cκ | IGKC*03 | Cκ Light Chain Constant Region | cgaactgtggctgcaccatctgtcttcatcttcccgccatctgatgagcagttgaaatctggaactgcctctg |
| | constant | | Nucleotide Sequence | ttgtgtgcctgctgaataacttctatcccagagaggccaaagtacagcggaaggtggataacgccctcca |
| | region | | | atcgggtaactcccaggagagtgtcacagagcaggagagcaaggacagcacctacagcctcagcagc |
| | | | | accctgacgctgagcaaagcagactacgagaaacacaaagtctacgcctgcgaagtcacccatcaggg |
| | | | | cctgagctcgcccgtcacaaagagcttcaacaggggagagtgt |
| 211 | | | Cκ Light Chain Constant Region | RTVAAPSVFIFPPSDEQLKSGTASVVCENNFYPREAWQRKVDNALQSGNSQESV |
| | | | Amino Acid Sequence | TEQESKDSTYSLSSTLTLSKADYEKHKVYACEVTHQGLSSPVIKSFNRGEC |
| 212 | Human Cκ | IGKC*04 | Cκ Light Chain Constant Region | cgaactgtggctgcaccatctgtcttcatcttcccgccatctgatgagcagttgaaatctggaactgcctctg |
| | constant | | Nucleotide Sequence | ttgtgtgcctgctgaataacttctatcccagagaggccaaagtacagtggaaggtggataacgccctcca |
| | region | | | atcgggtaactcccaggagagtgtcacagagcaggacagcaaggacagcacctacagcctcagcagc |
| | | | | accctgacgctgagcaaagcagactacgagaaacacaaactctacgcctgcgaagtcacccatcaggg |
| | | | | cctgagctcgcccgtcacaaagagcttcaacaggggagagtgt |
| 213 | | | Cκ Light Chain Constant Region | RTVAAPSVFIFPPSDEQLKSGTASVVCLLNNFYPREAKVQWKVDNALQSGNSQESV |
| | | | Amino Acid Sequence | TEQDSKDSTYSLSSTLTLSKADYEKHKLYACEVTHQGLSSPVTKSFNRGEC |
| 214 | Human Cκ | IGKC*05 | Cκ Light Chain Constant Region | cgaactgtggctgcaccatctgtcttcatcttcccgccatctgatgagcagttgaaatctggaactgcctctg |
| | constant | | Nucleotide Sequence | ttgtgtgcctgctgaataacttctatcccagagaggccaaagtacagtggaaggtggataacgccctcca |
| | region | | | atcgggtaactcccaggagagtgtcacagagcaggacagcaaggacagcacctacagcctcagcaac |
| | | | | accctgacgctgagcaaagcagactacgagaaacacaaagtctacgcctgcgaagtcacccatcaggg |
| | | | | cctgagctcgcccgtcacaaagagcttcaacaggggagagtgc |
| 215 | | | Cκ Light Chain Constant Region | RTVAAPSVFIFPPSDEQLKSGTASVVCLLNNFYPREAKVQWKVDNALQSGNSQESV |
| | | | Amino Acid Sequence | TEQDSKDSTYSLSNTLTLSKADYEKHKVYACEVTHQGLSSPVTKSFNRGEC |
| 216 | Human Cλ | IGLC1* | Cλ Light Chain Constant Region | cccaaggccaaccccacggtcactctgacccgccctcctctgaggagctccaagccaacaaggccacac |
| | constant | 01 | Nucleotide Sequence | tagtgtgtctgatcagtgacttctacccgggagctgtgacagtggcttggaaggcagatggcagccccgt |
| | region | | | caaggcgggagtggagacgaccaaaccctccaaacagagcaacaacaagtacgcggccagcagcta |
| | | | | cctgagcctgacgcccgagcagtggaagtcccacagaagctacagctgccaggtcacgcatgaaggga |
| | | | | gcaccgtggagaagacagtggcccctacagaatgttca |
| 217 | | | Cλ Light Chain Constant Region | PKANPTVTLFPPSSEELQANKATLVCLISDFYPGAVTVAWKADGSPVKAGVETTKPS |
| | | | Amino Acid Sequence | KQSNNKYAASSYLSLTPEQWKSHRSYSCQVTHEGSTVEKTVAPTECS |
| 218 | Human Cλ | IGLC1* | Cλ Light Chain Constant Region | ggtcagcccaaggccaaccccactgtcactctgttcccgccctcctctgaggagctccaagccaacaagg |
| | constant | 02 | Nucleotide Sequence-version A | ccacactagtgtgtctgatcagtgacttctacccgggagctgtgacagtggcctggaaggcagatggcag |
| | region | | | ccccgtcaaggcgggagtggagaccaccaaaccctccaaacagagcaacaacaagtacgcggccagc |
| | | | | agctacctgagcctgacgcccgagcagtggaagtcccacagaagctacagctgccaggtcacgcatga |
| | | | | agggagcaccgtggagaagacagtggcccctacagaatgttca |
| 219 | | | Cλ Light Chain Constant Region | GQPKANPTVTLFPPSSEELQANKATLVCLISDFYPGAVTVAWKADGSPVKAGVETT |
| | | | Amino Acid Sequence-encoded | KPSKQSNNKYAASSYLSLTPEQWKSHRSYSCQVTHEGSTVEKTVAPTECS |
| | | | by version A or B | |
| 220 | | | Cλ Light Chain Constant Region | ggtcagcccaaggccaaccccactgtcactctgttcccgccctcctctgaggagctccaagccaacaagg |
| | | | Nucleotide Sequence-Version B | ccacactagtgtgtctgatcagtgacttctacccgggagctgtgacagtggcctggaaggcagatggcag |
| | | | | ccccgtcaaggcgggagtggagaccaccaaaccctccaaacagagcaacaacaagtacgcggccagc |
| | | | | agctacctgagcctgacgcccgagcagtggaagtcccacagaagctacagctgccaggtcacgcatga |
| | | | | agggagcaccgtggagaagacagtggcccctacagaatgttca |
| 221 | Human Cλ | IGLC2* | Cλ Light Chain Constant Region | ggccagcctaaggccgctccttctgtgaccctgttccccccatcctccgaggaactgcaggctaacaaggc |
| | constant | 01 | Nucleotide Sequence-Version A | caccctcgtgtgcctgatcagcgacttctaccctggcgccgtgaccgtggcctggaaggctgatagctctc |
| | region | | | ctgtgaaggccggcgtggaaaccaccaccccttccaagcagtccaacaacaaatacgccgcctcctccta |
| | | | | cctgtccctgacccctgagcagtggaagtcccaccggtcctacagctgccaagtgacccacgagggctcc |
| | | | | accgtggaaaagaccgtggctcctaccgagtgctcc |
| 222 | | | Cλ Light Chain Constant Region | ggccagcctaaagctgcccccagcgtcaccctgtttcctccctccagcgaggagctccaggccaacaagg |
| | | | Nucleotide Sequence-Version B | ccaccctcgtgtgcctgatctccgacttctatcccggcgctgtgaccgtggcttggaaagccgactccagcc |
| | | | | ctgtcaaagccggcgtggagaccaccacaccctccaagcagtccaacaacaagtacgccgcctccagct |
| | | | | atctctccctgacccctgagcagtggaagtcccaccggtcctactcctgtcaggtgacccacgagggctcc |
| | | | | accgtggaaaagaccgtcgcccccaccgagtgctcc |
| 223 | | | Cλ Light Chain Constant Region | GQPKANPTVTLFPPSSEELQANKATLVCLISDFYPGAVTVAWKADGSPVKAGVETT |
| | | | Amino Acid Sequence-Encoded | KPSKQSNNKYAASSYLSLTPEQWKSHRSYSCQVTHEGSTVEKTVAPTECS |
| | | | by Version A or B | |
| 224 | Human Cλ | IGLC2* | Cλ Light Chain Constant Region | ggtcagcccaaggctgccccctcggtcactctgttcccgccctcctctgaggagcttcaagccaacaaggc |
| | constant | 02 & | Nucleotide Sequence | cacactggtgtgtctcataagtgacttctacccgggagccgtgacagtggcctggaaggcagatagcag |
| | region | IGLC2* | | ccccgtcaaggcgggagtggagaccaccacaccctccaaacaaagcaacaacaagtacgcggccagc |
| | | 03 | | agctatctgagcctgacgcctgagcagtggaagtcccacagaagctacagctgccaggtcacgcatgaa |
| | | | | gggagcaccgtggagaagacagtggcccctacagaatgttca |
| 225 | | | Cλ Light Chain Constant Region | GQPKAAPSVTLFPPSSEELQANKATLVCLISDFYPGAVTVAWKADSSPVKAGVETTT |
| | | | Amino Acid Sequence | PSKQSNNKYAASSYLSLTPEQWKSHRSYSCQVTHEGSTVEKTVAPTECS |
| 226 | Human Cλ | IGLC3* | Cλ Light Chain Constant Region | cccaaggctgccccctcggtcactctgttcccaccctcctctgaggagcttcaagccaacaaggccacact |
| | constant | 01 | Nucleotide Sequence | ggtgtgtctcataagtgacttctacccgggagccgtgacagttgcctggaaggcagatagcagccccgtc |
| | region | | | aaggcgggggtggagaccaccacaccctccaaacaaagcaacaacaagtacgcggccagcagctacc |
| | | | | tgagcctgacgcctgagcagtggaagtcccacaaaagctacagctgccaggtcacgcatgaagggagc |
| | | | | accgtggagaagacagttgcccctacggaatgttca |
| 227 | | | Cλ Light Chain Constant Region | PKAAPSVTLFPPSSEELQANKATLVCLISDFYPGAVTVAWKADSSPVKAGVETTTPS |
| | | | Amino Acid Sequence | KQSNNKYAASSYLSLTPEQWKSHKSYSCQVTHEGSTVEKTVAPTECS |
| 228 | Human Cλ | IGLC3* | Cλ Light Chain Constant Region | ggtcagcccaaggctgccccctcggtcactctgttcccaccctcctctgaggagcttcaagccaacaaggc |
| | constant | 02 | Nucleotide Sequence | cacactggtgtgtctcataagtgacttctacccggggccagtgacagttgcctggaaggcagatagcagc |
| | region | | | cccgtcaaggcgggggtggagaccaccacaccctccaaacaaagcaacaacaagtacgcggccagca |
| | | | | gctacctgagcctgacgcctgagcagtggaagtcccacaaaagctacagctgccaggtcacgcatgaag |
| | | | | ggagcaccgtggagaagacagtggcccctacggaatgttca |
| 229 | | | Cλ Light Chain Constant Region | GQPKAAPSVTLFPPSSEELQANKATLVCLISDFYPGPVTVAWKADSSPVKAGVETTT |
| | | | Amino Acid Sequence | PSKQSNNKYAASSYLSLTPEQWKSHKSYSCQVTHEGSTVEKTVAPTECS |
| 230 | Human Cλ | IGLC3* | Cλ Light Chain Constant Region | ggtcagcccaaggctgccccctcggtcactctgttcccaccctcctctgaggagcttcaagccaacaaggc |
| | constant | 03 | Nucleotide Sequence | cacactggtgtgtctcataagtgacttctacccgggagccgtgacagtggcctggaaggcagatagcag |
| | region | | | ccccgtcaaggcgggagtggagaccaccacaccctccaaacaaagcaacaacaagtacgcggccagc |
| | | | | agctacctgagcctgacgcctgagcagtggaagtcccacaaaagctacagctgccaggtcacgcatgaa |
| | | | | gggagcaccgtggagaagacagtggcccctacagaatgttca |
| 231 | | | Cλ Light Chain Constant Region | GQPKAAPSVTLFPPSSEELQANKATLVCLISDFYPGAVTVAWKADSSPVKAGVETTT |
| | | | Amino Acid Sequence | PSKQSNNKYAASSYLSLTPEQWKSHKSYSCQVTHEGSTVEKTVAPTECS |
| 232 | Human Cλ | IGLC3* | Cλ Light Chain Constant Region | ggtcagcccaaggctgccccctcggtcactctgttcccgccctcctctgaggagcttcaagccaacaaggc |
| | constant | 04 | Nucleotide Sequence | cacactggtgtgtctcataagtgacttctacccgggagccgtgacagtggcctggaaggcagatagcag |
| | region | | | ccccgtcaaggcgggagtggagaccaccacaccctccaaacaaagcaacaacaagtacgcggccagc |
| | | | | agctacctgagcctgacgcctgagcagtggaagtcccacagaagctacagctgccaggtcacgcatgaa |
| | | | | gggagcaccgtggagaagacagtggcccctacagaatgttca |
| 233 | | | Cλ Light Chain Constant Region | GQPKAAPSVTLFPPSSEELQANKATLVCLISDFYPGAVTVAWKADSSPVKAGVETTT |
| | | | Amino Acid Sequence | PSKQSNNKYAASSYLSLTPEQWKSHRSYSCQVTHEGSTVEKTVAPTECS |
| 234 | Human Cλ | IGLC6* | Cλ Light Chain Constant Region | ggtcagcccaaggctgccccatcggtcactctgttcccgccctcctctgaggagcttcaagccaacaaggc |
| | constant | 01 | Nucleotide Sequence | cacactggtgtgcctgatcagtgacttctacccgggagctgtgaaagtggcctggaaggcagatggcag |
| | region | | | ccccgtcaacacgggagtggagaccaccacaccctccaaacagagcaacaacaagtacgcggccagc |
| | | | | agctacctgagcctgacgcctgagcagtggaagtcccacagaagctacagctgccaggtcacgcatgaa |
| | | | | gggagcaccgtggagaagacagtggcccctgcagaatgttca |
| 235 | | | Cλ Light Chain Constant Region | GQPKAAPSVTLFPPSSEELQANKATLVCLISDFYPGAVKVAWKADGSPVNTGVETT |
| | | | Amino Acid Sequence | TPSKQSNNKYAASSYLSLTPEQWKSHRSYSCQVTHEGSTVEKTVAPAECS |
| 236 | Human Cλ | IGLC7* | Cλ Light Chain Constant Region | ggtcagcccaaggctgccccatcggtcactctgttcccaccctcctctgaggagcttcaagccaacaaggc |
| | constant | 01 & | Nucleotide Sequence | cacactggtgtgtctcgtaagtgacttctacccgggagccgtgacagtggcctggaaggcagatggcag |
| | region | IGLC7* | | ccccgtcaaggtgggagtggagaccaccaaaccctccaaacaaagcaacaacaagtatgcggccagc |
| | | 02 | | agctacctgagcctgacgcccgagcagtggaagtcccacagaagctacagctgccgggtcacgcatga |
| | | | | agggagcaccgtggagaagacagtggcccctgcagaatgctct |
| 237 | | | Cλ Light Chain Constant Region | GQPKAAPSVTLFPPSSEELQANKATLVCLVSDFYPGAVTVAWKADGSPVIWGVETT |
| | | | Amino Acid Sequence | KPSKQSNNKYAASSYLSLTPEQWKSHRSYSCRVTHEGSTVEKTVAPAECS |
| 238 | 413G05-CDRH1 | | Amino acid sequence of CDRH1 | GFTFSDYY |
| | (IMGT) | | of 413G05 using IMGT | |
| 239 | 413G05-CDRH2 | | Amino acid sequence of CDRH2 | ISTSGSTI |
| | (IMGT) | | of 413G05 using IMGT | |
| 240 | 413G05-CDRH3 | | Amino acid sequence of CDRH3 | ARGITGINFYHYGLGV |
| | (IMGT) | | of 413G05 using IMGT | |
| 241 | 413G05-CDRH1 | | Amino acid sequence of CDRH1 | DYYMS |
| | (Kabat) | | of 413G05 using Kabat | |
| 242 | 413G05-CDRH2 | | Amino acid sequence of CDRH2 | YISTSGSTIYYADSVKG |
| | (Kabat) | | of 413G05 using Kabat | |
| 243 | 413G05-CDRH3 | | Amino acid sequence of CDRH3 | GITGTNFYHYGLGV |
| | (Kabat) | | of 413G05 using Kabat | |
| 244 | 413G05-Heavy chain | | Amino acid sequence of V_{H} of | QVQLVESGGGLVKPGGSLRLSCAASGFTFSDYYMSWIRQVPGKGLEWVSYISTSG |
| | variable region | | 413G05 | STIYYADSVKGRFTISRDNAKNSLYLQMNSLRAEDAAVYHCARGITGTNFYHYGLG |
| | | | | VWGQGTTVTVSS |
| 245 | 413G05-Heavy chain | | Nucleic acid sequence of V_{H} of | CAGGTGCAGCTGGTGGAGTCTGGGGGAGGCTTGGTCAAGCCTGGAGGGTCCCT |
| | variable region | | 413G05 | GAGACTCTCCTGTGCAGCCTCTGGATTCACCTTCAGTGACTACTACATGAGCTG |
| | | | | GATCCGCCAGGTTCCAGGGAAGGGGCTGGAGTGGGTTTCATACATTAGTACTAG |
| | | | | TGGTAGTACCATATACTACGCAGACTCTGTGAAGGGCCGATTCACCATCTCCAG |
| | | | | GGACAACGCCAAGAACTCACTGTATCTACAAATGAACAGCCTGAGAGCCGAGGA |
| | | | | CGCGGCCGTGTATCACTGTGCGAGAGGTATAACTGGAACTAACTTCTACCACTA |
| | | | | CGGTTTGGGCGTCTGGGGCCAAGGGACCACGGTCACCGTCTCCTCAG |
| 246 | 413G05-full heavy | | Amino acid sequence of 413G05 | QVQLVESGGGLVKPGGSLRLSCAASGFTFSDYYMSWIRQVPGKGLEWVSYISTSG |
| | chain sequence | | heavy chain | STIYYADSVKGRFTISRDNAKNSLYLQMNSLRAEDAAVYHCARGITGTNFYHYGLG |
| | | | | VWGQGTTVWSSASTKGPSVFPLAPSSKSTSGGTAALGCLVKDYFPEPVTVSWNS |
| | | | | GALTSGVHTFPAVLQSSGLYSLSSVVTVPSSSLGTQTYICNVNHKPSNTKVDKKVEP |
| | | | | KSCDKTHTCPPCPAPELLGGPSVFLFPPKPKDTLMISRTPEVTCVVVDVSHEDPEVK |
| | | | | FNWYVDGVEVHNAKTKPREEQYNSTYRWSVLTVLHQDWLNGKEYKCKVSNKALP |
| | | | | APIEKTISKAKGQPREPQVYTLPPSRDELTKNQVSLTCLVKGFYPSDIAVEWESNGQ |
| | | | | PENNYKTTPPVLDSDGSFFLYSKLTVDKSRWQQGNVFSCSVMHEALHNHYTQKSL |
| | | | | SLSPGK |
| 247 | 413G05-full heavy | | Nucleic acid sequence of 413G05 | CAGGTGCAGCTGGTGGAGTCTGGGGGAGGCTTGGTCAAGCCTGGAGGGTCCCT |
| | chain sequence | | heavy chain | GAGACTCTCCTGTGCAGCCTCTGGATTCACCTTCAGTGACTACTACATGAGCTG |
| | | | | GATCCGCCAGGTTCCAGGGAAGGGGCTGGAGTGGGTTTCATACATTAGTACTAG |
| | | | | TGGTAGTACCATATACTACGCAGACTCTGTGAAGGGCCGATTCACCATCTCCAG |
| | | | | GGACAACGCCAAGAACTCACTGTATCTACAAATGAACAGCCTGAGAGCCGAGGA |
| | | | | CGCGGCCGTGTATCACTGTGCGAGAGGTATAACTGGAACTAACTTCTACCACTA |
| | | | | CGGTTTGGGCGTCTGGGGCCAAGGGACCACGGTCACCGTCTCCTCAGCCAGCAC |
| | | | | CAAGGGCCCCTCTGTGTTCCCTCTGGCCCCTTCCAGCAAGTCCACCTCTGGCGG |
| | | | | AACAGCCGCTCTGGGCTGCCTCGTGAAGGACTACTTCCCCGAGCCTGTGACCGT |
| | | | | GTCCTGGAACTCTGGCGCTCTGACCAGCGGAGTGCACACCTTCCCTGCTGTGCT |
| | | | | GCAGTCCTCCGGCCTGTACTCCCTGTCCTCCGTCGTGACCGTGCCTTCCAGCTC |
| | | | | TCTGGGCACCCAGACCTACATCTGCAACGTGAACCACAAGCCCTCCAACACCAAG |
| | | | | GTGGACAAGAAGGTGGAACCCAAGTCCTGCGACAAGACCCACACCTGTCCCCCT |
| | | | | TGTCCTGCCCCTGAACTGCTGGGCGGACCTTCCGTGTTCCTGTTCCCCCCAAAG |
| | | | | CCCAAGGACACCCTGATGATCTCCCGGACCCCCGAAGTGACCTGCGTGGTGGTG |
| | | | | GATGTGTCCCACGAGGACCCTGAAGTGAAGTTCAATTGGTACGTGGACGGCGTG |
| | | | | GAAGTGCACAACGCCAAGACCAAGCCTAGAGAGGAACAGTACAACTCCACCTAC |
| | | | | CGGGTGGTGTCCGTGCTGACCGTGCTGCACCAGGATTGGCTGAACGGCAAAGA |
| | | | | GTACAAGTGCAAGGTGTCCAACAAGGCCCTGCCTGCCCCCATCGAAAAGACCAT |
| | | | | CTCCAAGGCCAAGGGCCAGCCCCGGGAACCCCAGGTGTACACACTGCCCCCTAG |
| | | | | CAGGGACGAGCTGACCAAGAACCAGGTGTCCCTGACCTGTCTCGTGAAAGGCTT |
| | | | | CTACCCCTCCGATATCGCCGTGGAATGGGAGTCCAACGGCCAGCCTGAGAACAA |
| | | | | CTACAAGACCACCCCCCCTGTGCTGGACTCCGACGGCTCATTCTTCCTGTACAGC |
| | | | | AAGCTGACAGTGGACAAGTCCCGGTGGCAGCAGGGCAACGTGTTCTCCTGCTCC |
| | | | | GTGATGCACGAGGCCCTGCACAACCACTACACCCAGAAGTCCCTGTCCCTGAGC |
| | | | | CCCGGCAAG |
| 248 | 413G05-CDRL1 | | Amino acid sequence of CDRL1 | QGINSW |
| | (IMGT) | | of 413G05 using IMGT | |
| 249 | 413G05-CDRL2 | | Amino acid sequence of CDRL2 | AAS |
| | (IMGT) | | of 413G05 using IMGT | |
| 250 | 413G05-CDRL3 | | Amino acid sequence of CDRL3 | QQVNSFPLT |
| | (IMGT) | | of 413G05 using IMGT | |
| 251 | 413G05-CDRL1 | | Amino acid sequence of CDRL1 | RASQGINSWLA |
| | (Kabat) | | of 413G05 using Kabat | |
| 252 | 413G05-CDRL2 | | Amino acid sequence of CDRL2 | AASTLQS |
| | (Kabat) | | of 413G05 using Kabat | |
| 253 | 413G05-CDRL3 | | Amino acid sequence of CDRL3 | QQVNSFPLT |
| | (Kabat) | | of 413G05 using Kabat | |
| 254 | 413G05-Light chain | | Amino acid sequence of V_{L} of | DIQMTQSPSSVSASVGDRVTITCRASQGINSWLAWYQQKPGKAPKLLIYAASTLQS |
| | variable region | | 413G05 | GVPSRFSGSGSGADFTLTISSLQPEDFATYYCQQVNSFPLTFGGGTKVEIK |
| 255 | 413G05-Light chain | | Nucleic acid sequence of V_{L} of | GACATCCAGATGACCCAGTCTCCATCTTCCGTGTCTGCATCTGTAGGAGACAGA |
| | variable region | | 413G05 | GTCACCATCACTTGTCGGGCGAGTCAGGGTATTAACAGCTGGTTAGCCTGGTAT |
| | | | | CAGCAGAAACCAGGGAAAGCCCCTAAGCTCCTGATCTATGCTGCATCCACTTTG |
| | | | | CAAAGTGGGGTCCCATCAAGGTTCAGCGGCAGTGGGTCTGGGGCAGATTTCACT |
| | | | | CTCACCATCAGCAGCCTGCAGCCTGAAGATTTTGCAACTTACTATTGTCAACAGG |
| | | | | TTAACAGTTTCCCGCTCACTTTCGGCGGAGGGACCAAGGTGGAGATCAAAC |
| 256 | 413G05-full light | | Amino acid sequence of 413G05 | DIQMTQSPSSVSASVGDRVTITCRASQGINSWLAWYQQKPGKAPKLLIYAASTLQS |
| | chain sequence | | light chain | GVPSRFSGSGSGADFTLTISSLQPEDFATYYCQQVNSFPLTFGGGTKVEIKRTVAAP |
| | | | | SVFIFPPSDEQLKSGTASVVCLLNNFYPREAKVQWKVDNALQSGNSQESVTEQDSK |
| | | | | DSTYSLSSTLTLSKADYEKHKVYACEVTHQGLSSPVTKSFNRGEC |
| 257 | 413G05-full light | | Nucleic acid sequence of 413G05 | GACATCCAGATGACCCAGTCTCCATCTTCCGTGTCTGCATCTGTAGGAGACAGA |
| | chain sequence | | light chain | GTCACCATCACTTGTCGGGCGAGTCAGGGTATTAACAGCTGGTTAGCCTGGTAT |
| | | | | CAGCAGAAACCAGGGAAAGCCCCTAAGCTCCTGATCTATGCTGCATCCACTTTG |
| | | | | CAAAGTGGGGTCCCATCAAGGTTCAGCGGCAGTGGGTCTGGGGCAGATTTCACT |
| | | | | CTCACCATCAGCAGCCTGCAGCCTGAAGATTTTGCAACTTACTATTGTCAACAGG |
| | | | | TTAACAGTTTCCCGCTCACTTTCGGCGGAGGGACCAAGGTGGAGATCAAACGTA |
| | | | | CGGTGGCCGCTCCCTCCGTGTTCATCTTCCCACCTTCCGACGAGCAGCTGAAGT |
| | | | | CCGGCACCGCTTCTGTCGTGTGCCTGCTGAACAACTTCTACCCCCGCGAGGCCA |
| | | | | AGGTGCAGTGGAAGGTGGACAACGCCCTGCAGTCCGGCAACTCCCAGGAATCCG |
| | | | | TGACCGAGCAGGACTCCAAGGACAGCACCTACTCCCTGTCCTCCACCCTGACCC |
| | | | | TGTCCAAGGCCGACTACGAGAAGCACAAGGTGTACGCCTGCGAAGTGACCCACC |
| | | | | AGGGCCTGTCTAGCCCCGTGACCAAGTCTTTCAACCGGGGCGAGTGT |
| 258 | 413F09-CDRH1 | | Amino acid sequence of CDRH1 | GFTFSYYA |
| | (IMGT) | | of 413F09 using IMGT | |
| 259 | 413F09-CDRH2 | | Amino acid sequence of CDRH2 | ISGGGGNT |
| | (IMGT) | | of 413F09 using IMGT | |
| 260 | 413F09-CDRH3 | | Amino acid sequence of CDRH3 | AKDRMKQLVRAYYFDY |
| | (IMGT) | | of 413F09 using IMGT | |
| 261 | 413F09-CDRH1 | | Amino acid sequence of CDRH1 | YYAMS |
| | (Kabat) | | of 413F09 using Kabat | |
| 262 | 413F09-CDRH2 | | Amino acid sequence of CDRH2 | TISGGGGNTHYADSVKG |
| | (Kabat) | | of 413F09 using Kabat | |
| 263 | 413F09-CDRH3 | | Amino acid sequence of CDRH3 | DRMKQLVRAYYFDY |
| | (Kabat) | | of 413F09 using Kabat | |
| 264 | 413F09-Heavy chain | | Amino acid sequence of V_{H} of | EVPLVESGGGLVQPGGSLRLSCAASGFTFSYYAMSWVRQAPGKGLDWVSTISGGG |
| | variable region | | 413F09 | GNTHYADSVKGRFTISRDNSKNTLYLHMNSLRAEDTAVYYCAKDRMKQLVRAYYF |
| | | | | DYWGQGTLVTVSS |
| 265 | 413F09-Heavy chain | | Nucleic acid sequence of V_{H} of | GAGGTGCCGCTGGTGGAGTCTGGGGGAGGCTTGGTACAGCCTGGGGGGTCCCT |
| | variable region | | 413F09 | GAGACTCTCCTGTGCAGCCTCTGGATTCACGTTTAGCTACTATGCCATGAGCTG |
| | | | | GGTCCGTCAGGCTCCAGGGAAGGGGCTGGACTGGGTCTCAACTATTAGTGGTG |
| | | | | GTGGTGGTAACACACACTACGCAGACTCCGTGAAGGGCCGATTCACTATATCCA |
| | | | | GAGACAATTCCAAGAACACGCTGTATCTGCACATGAACAGCCTGAGAGCCGAAG |
| | | | | ACACGGCCGTCTATTACTGTGCGAAGGATCGGATGAAACAGCTCGTCCGGGCCT |
| | | | | ACTACTTTGACTACTGGGGCCAGGGAACCCTGGTCACCGTCTCCTCAG |
| 266 | 413F09-full heavy | | Amino acid sequence of 413F09 | EVPLVESGGGLVQPGGSLRLSCAASGFTFSYYAMSWVRQAPGKGLDWVSTISGGG |
| | chain sequence | | heavy chain | GNTHYADSVKGRFTISRDNSKNTLYLHMNSLRAEDTAVYYCAKDRMKQLVRAYYF |
| | | | | DYWGQGTLVTVSSASTKGPSVFPLAPSSKSTSGGTAALGCLVKDYFPEPVTVSWNS |
| | | | | GALTSGVHTFPAVLQSSGLYSLSSVVTVPSSSLGTQTYICNVNHKPSNTKVDKKVEP |
| | | | | KSCDKTHTCPPCPAPELLGGPSVFLFPPKPKDTLMISRTPEVTCVWDVSHEDPEVK |
| | | | | FNWYVDGVEVHNAKTKPREEQYNSTYRVVSVLTVLHQDWLNGKEYKCKVSNKALP |
| | | | | APIEKTISKAKGQPREPQVYTLPPSRDELTKNQVSLTCLVKGFYPSDIAVEWESNGQ |
| | | | | PENNYKTTPPVLDSDGSFFLYSKLTVDKSRWQQGNVFSCSVMHEALHNHYTQKSL |
| | | | | SLSPGK |
| 267 | 413F09-full heavy | | Nucleic acid sequence of 413F09 | GAGGTGCCGCTGGTGGAGTCTGGGGGAGGCTTGGTACAGCCTGGGGGGTCCCT |
| | chain sequence | | heavy chain | GAGACTCTCCTGTGCAGCCTCTGGATTCACGTTTAGCTACTATGCCATGAGCTG |
| | | | | GGTCCGTCAGGCTCCAGGGAAGGGGCTGGACTGGGTCTCAACTATTAGTGGTG |
| | | | | GTGGTGGTAACACACACTACGCAGACTCCGTGAAGGGCCGATTCACTATATCCA |
| | | | | GAGACAATTCCAAGAACACGCTGTATCTGCACATGAACAGCCTGAGAGCCGAAG |
| | | | | ACACGGCCGTCTATTACTGTGCGAAGGATCGGATGAAACAGCTCGTCCGGGCCT |
| | | | | ACTACTTTGACTACTGGGGCCAGGGAACCCTGGTCACCGTCTCCTCAGCCAGCA |
| | | | | CCAAGGGCCCCTCTGTGTTCCCTCTGGCCCCTTCCAGCAAGTCCACCTCTGGCG |
| | | | | GAACAGCCGCTCTGGGCTGCCTCGTGAAGGACTACTTCCCCGAGCCTGTGACCG |
| | | | | TGTCCTGGAACTCTGGCGCTCTGACCAGCGGAGTGCACACCTTCCCTGCTGTGC |
| | | | | TGCAGTCCTCCGGCCTGTACTCCCTGTCCTCCGTCGTGACCGTGCCTTCCAGCT |
| | | | | CTCTGGGCACCCAGACCTACATCTGCAACGTGAACCACAAGCCCTCCAACACCAA |
| | | | | GGTGGACAAGAAGGTGGAACCCAAGTCCTGCGACAAGACCCACACCTGTCCCCC |
| | | | | TTGTCCTGCCCCTGAACTGCTGGGCGGACCTTCCGTGTTCCTGTTCCCCCCAAA |
| | | | | GCCCAAGGACACCCTGATGATCTCCCGGACCCCCGAAGTGACCTGCGTGGTGGT |
| | | | | GGATGTGTCCCACGAGGACCCTGAAGTGAAGTTCAATTGGTACGTGGACGGCGT |
| | | | | GGAAGTGCACAACGCCAAGACCAAGCCTAGAGAGGAACAGTACAACTCCACCTA |
| | | | | CCGGGTGGTGTCCGTGCTGACCGTGCTGCACCAGGATTGGCTGAACGGCAAAG |
| | | | | AGTACAAGTGCAAGGTGTCCAACAAGGCCCTGCCTGCCCCCATCGAAAAGACCA |
| | | | | TCTCCAAGGCCAAGGGCCAGCCCCGGGAACCCCAGGTGTACACACTGCCCCCTA |
| | | | | GCAGGGACGAGCTGACCAAGAACCAGGTGTCCCTGACCTGTCTCGTGAAAGGCT |
| | | | | TCTACCCCTCCGATATCGCCGTGGAATGGGAGTCCAACGGCCAGCCTGAGAACA |
| | | | | ACTACAAGACCACCCCCCCTGTGCTGGACTCCGACGGCTCATTCTTCCTGTACAG |
| | | | | CAAGCTGACAGTGGACAAGTCCCGGTGGCAGCAGGGCAACGTGTTCTCCTGCTC |
| | | | | CGTGATGCACGAGGCCCTGCACAACCACTACACCCAGAAGTCCCTGTCCCTGAG |
| | | | | CCCCGGCAAG |
| 268 | 413F09-CDRL1 | | Amino acid sequence of CDRL1 | QDISTY |
| | (IMGT) | | of 413F09 using IMGT | |
| 269 | 413F09-CDRL2 | | Amino acid sequence of CDRL2 | GTS |
| | (IMGT) | | of 413F09 using IMGT | |
| 270 | 413F09-CDRL3 | | Amino acid sequence of CDRL3 | QQLHTDPIT |
| | (IMGT) | | of 413F09 using IMGT | |
| 271 | 413F09-CDRL1 | | Amino acid sequence of CDRL1 | WASQDISTYLG |
| | (Kabat) | | of 413F09 using Kabat | |
| 272 | 413F09-CDRL2 | | Amino acid sequence of CDRL2 | GTSSLQS |
| | (Kabat) | | of 413F09 using Kabat | |
| 273 | 413F09-CDRL3 | | Amino acid sequence of CDRL3 | QQLHTDPIT |
| | (Kabat) | | of 413F09 using Kabat | |
| 274 | 413F09-Light chain | | Amino acid sequence of V_{L} of | DIQLTQSPSFLSASVGDRVTITCWASQDISTYLGWYQQKPGKAPKLLIYGTSSLQS |
| | variable region | | 413F09 | GVPSRFSGSGSGTEFTLTISSLQPEDFATYYCQQLHTDPITFGQGTRLEIK |
| 275 | 413F09-Light chain | | Nucleic acid sequence of V_{L} of | GACATCCAGTTGACCCAGTCTCCATCCTTCCTGTCTGCATCTGTAGGAGACAGA |
| | variable region | | 413F09 | GTCACCATCACTTGCTGGGCCAGTCAGGACATTAGCACTTATTTAGGCTGGTAT |
| | | | | CAGCAAAAACCAGGGAAAGCCCCTAAGCTCCTGATCTATGGTACATCCAGTTTG |
| | | | | CAAAGTGGGGTCCCATCAAGGTTCAGCGGCAGTGGATCTGGGACAGAATTCACT |
| | | | | CTCACAATCAGCAGCCTGCAGCCTGAAGATTTTGCAACTTATTACTGTCAACAGC |
| | | | | TTCATACTGACCCGATCACCTTCGGCCAAGGGACACGACTGGAGATCAAAC |
| 276 | 413F09-full light | | Amino acid sequence of 413F09 | DIQLTQSPSFLSASVGDRVTITCWASQDISTYLGWYQQKPGKAPKLLIYGTSSLQS |
| | chain sequence | | light chain | GVPSRFSGSGSGTEFTLTISSLQPEDFATYYCQQLHTDPITFGQGTRLEIKRTVAAP |
| | | | | SVFIFPPSDEQLKSGTASVVCLLNNFYPREAKVQWKVDNALQSGNSQESVTEQDSK |
| | | | | DSTYSLSSTLTLSKADYEKHKVYACEVTHQGLSSPVTKSFNRGEC |
| 277 | 413F09-full light | | Nucleic acid sequence of 413F09 | GACATCCAGTTGACCCAGTCTCCATCCTTCCTGTCTGCATCTGTAGGAGACAGA |
| | chain sequence | | light chain | GTCACCATCACTTGCTGGGCCAGTCAGGACATTAGCACTTATTTAGGCTGGTAT |
| | | | | CAGCAAAAACCAGGGAAAGCCCCTAAGCTCCTGATCTATGGTACATCCAGTTTG |
| | | | | CAAAGTGGGGTCCCATCAAGGTTCAGCGGCAGTGGATCTGGGACAGAATTCACT |
| | | | | CTCACAATCAGCAGCCTGCAGCCTGAAGATTTTGCAACTTATTACTGTCAACAGC |
| | | | | TTCATACTGACCCGATCACCTTCGGCCAAGGGACACGACTGGAGATCAAACGTA |
| | | | | CGGTGGCCGCTCCCTCCGTGTTCATCTTCCCACCTTCCGACGAGCAGCTGAAGT |
| | | | | CCGGCACCGCTTCTGTCGTGTGCCTGCTGAACAACTTCTACCCCCGCGAGGCCA |
| | | | | AGGTGCAGTGGAAGGTGGACAACGCCCTGCAGTCCGGCAACTCCCAGGAATCCG |
| | | | | TGACCGAGCAGGACTCCAAGGACAGCACCTACTCCCTGTCCTCCACCCTGACCC |
| | | | | TGTCCAAGGCCGACTACGAGAAGCACAAGGTGTACGCCTGCGAAGTGACCCACC |
| | | | | AGGGCCTGTCTAGCCCCGTGACCAAGTCTTTCAACCGGGGCGAGTGT |
| 278 | 414B06-CDRH1 | | Amino acid sequence of CDRH1 | GFTFSSYW |
| | (IMGT) | | of 414B06 using IMGT | |
| 279 | 414B06-CDRH2 | | Amino acid sequence of CDRH2 | IKQDGSEK |
| | (IMGT) | | of 414B06 using IMGT | |
| 280 | 414B06-CDRH3 | | Amino acid sequence of CDRH3 | ARVRQWSDYSDY |
| | (IMGT) | | of 414B06 using IMGT | |
| 281 | 414B06-CDRH1 | | Amino acid sequence of CDRH1 | SYWMN |
| | (Kabat) | | of 414B06 using Kabat | |
| 282 | 414B06-CDRH2 | | Amino acid sequence of CDRH2 | NIKQDGSEKYYVDSVKG |
| | (Kabat) | | of 414B06 using Kabat | |
| 283 | 414B06-CDRH3 | | Amino acid sequence of CDRH3 | VRQWSDYSDY |
| | (Kabat) | | of 414B06 using Kabat | |
| 284 | 414B06-Heavy chain | | Amino acid sequence of V_{H} of | EVHLVESGGGLVQPGGSLRLSCAASGFTFSSYWMNWVRQAPGKGLEWVANIKQD |
| | variable region | | 414B06 | GSEKYYVDSVKGRFTVSRDNAKNSLYLQMNSLRAEDTAVYYCARVRQWSDYSDY |
| | | | | WGQGTPVTVSS |
| 285 | 414B06-Heavy chain | | Nucleic acid sequence of V_{H} of | GAGGTGCACCTGGTGGAGTCTGGGGGAGGCTTGGTCCAGCCTGGGGGGTCCCT |
| | variable region | | 414B06 | GAGACTCTCCTGTGCAGCCTCTGGATTCACCTTTAGTAGCTATTGGATGAACTG |
| | | | | GGTCCGCCAGGCTCCAGGGAAGGGGCTGGAGTGGGTGGCCAACATAAAGCAAG |
| | | | | ATGGAAGTGAGAAATACTATGTGGACTCTGTGAAGGGCCGCTTCACCGTCTCCA |
| | | | | GAGACAACGCCAAGAACTCACTGTATCTGCAAATGAACAGCCTGAGAGCCGAGG |
| | | | | ACACGGCTGTGTATTACTGTGCGAGAGTTCGACAATGGTCCGACTACTCTGACT |
| | | | | ACTGGGGCCAGGGAACCCCGGTCACCGTCTCCTCAG |
| 286 | 414B06-full heavy | | Amino acid sequence of 414B06 | EVHLVESGGGLVQPGGSLRLSCAASGFTFSSYWMNWVRQAPGKGLEWVANIKQD |
| | chain sequence | | heavy chain | GSEKYYVDSVKGRFTVSRDNAKNSLYLQMNSLRAEDTAVYYCARVRQWSDYSDY |
| | | | | WGQGTPVTVSSASTKGPSVFPLAPSSKSTSGGTAALGCLVKDYFPEPVTVSWNSGA |
| | | | | LTSGVHTFPAVLQSSGLYSLSSVVTVPSSSLGTQTYICNVNHKPSNTKVDKKVEPKS |
| | | | | CDKTHTCPPCPAPELLGGPSVFLFPPKPKDILMISRTPEVTCVVVDVSHEDPEVKFN |
| | | | | WYVDGVEVHNAKTKPREEQYNSTYRWSVLTVLHQDWLNGKEYKCKVSNKALPAP |
| | | | | IEKTISKAKGQPREPQVYTLPPSRDELTKNQVSLTCLVKGFYPSDIAVEWESNGQPE |
| | | | | NNYKTTDPVLDSDGSFFLYSKLTVDKSRWQQGNVFSCSVMHEALHNHYTQKSLSL |
| | | | | SPGK |
| 287 | 414B06-full heavy | | Nucleic acid sequence of 414B06 | GAGGTGCACCTGGTGGAGTCTGGGGGAGGCTTGGTCCAGCCTGGGGGGTCCCT |
| | chain sequence | | heavy chain | GAGACTCTCCTGTGCAGCCTCTGGATTCACCTTTAGTAGCTATTGGATGAACTG |
| | | | | GGTCCGCCAGGCTCCAGGGAAGGGGCTGGAGTGGGTGGCCAACATAAAGCAAG |
| | | | | ATGGAAGTGAGAAATACTATGTGGACTCTGTGAAGGGCCGCTTCACCGTCTCCA |
| | | | | GAGACAACGCCAAGAACTCACTGTATCTGCAAATGAACAGCCTGAGAGCCGAGG |
| | | | | ACACGGCTGTGTATTACTGTGCGAGAGTTCGACAATGGTCCGACTACTCTGACT |
| | | | | ACTGGGGCCAGGGAACCCCGGTCACCGTCTCCTCAGCCAGCACCAAGGGCCCCT |
| | | | | CTGTGTTCCCTCTGGCCCCTTCCAGCAAGTCCACCTCTGGCGGAACAGCCGCTC |
| | | | | TGGGCTGCCTCGTGAAGGACTACTTCCCCGAGCCTGTGACCGTGTCCTGGAACT |
| | | | | CTGGCGCTCTGACCAGCGGAGTGCACACCTTCCCTGCTGTGCTGCAGTCCTCCG |
| | | | | GCCTGTACTCCCTGTCCTCCGTCGTGACCGTGCCTTCCAGCTCTCTGGGCACCC |
| | | | | AGACCTACATCTGCAACGTGAACCACAAGCCCTCCAACACCAAGGTGGACAAGA |
| | | | | AGGTGGAACCCAAGTCCTGCGACAAGACCCACACCTGTCCCCCTTGTCCTGCCC |
| | | | | CTGAACTGCTGGGCGGACCTTCCGTGTTCCTGTTCCCCCCAAAGCCCAAGGACA |
| | | | | CCCTGATGATCTCCCGGACCCCCGAAGTGACCTGCGTGGTGGTGGATGTGTCCC |
| | | | | ACGAGGACCCTGAAGTGAAGTTCAATTGGTACGTGGACGGCGTGGAAGTGCACA |
| | | | | ACGCCAAGACCAAGCCTAGAGAGGAACAGTACAACTCCACCTACCGGGTGGTGT |
| | | | | CCGTGCTGACCGTGCTGCACCAGGATTGGCTGAACGGCAAAGAGTACAAGTGCA |
| | | | | AGGTGTCCAACAAGGCCCTGCCTGCCCCCATCGAAAAGACCATCTCCAAGGCCA |
| | | | | AGGGCCAGCCCCGGGAACCCCAGGTGTACACACTGCCCCCTAGCAGGGACGAGC |
| | | | | TGACCAAGAACCAGGTGTCCCTGACCTGTCTCGTGAAAGGCTTCTACCCCTCCG |
| | | | | ATATCGCCGTGGAATGGGAGTCCAACGGCCAGCCTGAGAACAACTACAAGACCA |
| | | | | CCCCCCCTGTGCTGGACTCCGACGGCTCATTCTTCCTGTACAGCAAGCTGACAG |
| | | | | TGGACAAGTCCCGGTGGCAGCAGGGCAACGTGTTCTCCTGCTCCGTGATGCACG |
| | | | | AGGCCCTGCACAACCACTACACCCAGAAGTCCCTGTCCCTGAGCCCCGGCAAG |
| 288 | 414B06-CDRL1 | | Amino acid sequence of CDRL1 | QGISSW |
| | (IMGT) | | of 414B06 using IMGT | |
| 289 | 414B06-CDRL2 | | Amino acid sequence of CDRL2 | AAS |
| | (IMGT) | | of 414B06 using IMGT | |
| 290 | 414B06-CDRL3 | | Amino acid sequence of CDRL3 | QQANSFPFT |
| | (IMGT) | | of 414B06 using IMGT | |
| 291 | 414B06-CDRL1 | | Amino acid sequence of CDRL1 | RASQGISSWLA |
| | (Kabat) | | of 414B06 using Kabat | |
| 292 | 414B06-CDRL2 | | Amino acid sequence of CDRL2 | AASSLQS |
| | (Kabat) | | of 414B06 using Kabat | |
| 293 | 414B06-CDRL3 | | Amino acid sequence of CDRL3 | QQANSFPFT |
| | (Kabat) | | of 414B06 using Kabat | |
| 294 | 414B06-Light chain | | Amino acid sequence of V_{L} of | DIQMTQSPSSVSASVGDRVTITCRASQGISSWLAWYQQKPGKAPKLLIYAASSLQS |
| | variable region | | 414B06 | GVPSRFSGSGSGTDFILTISSLQPEDFATYYCQQANSFPFTFGPGTKVDIK |
| 295 | 414B06-Light chain | | Nucleic acid sequence of V_{L} of | GACATCCAGATGACCCAGTCTCCATCTTCCGTGTCTGCATCTGTAGGAGACAGA |
| | variable region | | 414606 | GTCACCATCACTTGTCGGGCGAGTCAGGGTATTAGCAGCTGGTTAGCCTGGTAT |
| | | | | CAGCAGAAACCAGGGAAAGCCCCTAAGCTCCTGATCTATGCTGCATCCAGTTTG |
| | | | | CAAAGTGGGGTCCCATCAAGGTTCAGCGGCAGTGGATCTGGGACAGATTTCACT |
| | | | | CTCACCATCAGCAGCCTGCAGCCTGAAGATTTTGCAACTTACTATTGTCAACAGG |
| | | | | CTAACAGTTTCCCATTCACTTTCGGCCCTGGGACCAAAGTGGATATCAAAC |
| 296 | 414B06-full light | | Amino acid sequence of 414B06 | DIQMTQSPSSVSASVGDRVTITCRASQGISSWLAWYQQKPGKAPKLLIYAASSLQS |
| | chain sequence | | light chain | GVPSRFSGSGSGTDFTLTISSLQPEDFATYYCQQANSFPFTFGPGTKVDIKRTVAAP |
| | | | | SVFIFPPSDEQLKSGTASVVCLLNNFYPREAKVQWKVDNALQSGNSQESVTEQDSK |
| | | | | DSTYSLSSTLTLSKADYEKHKVYACEVTHQGLSSPVTKSFNRGEC |
| 297 | 414B06-full light | | Nucleic acid sequence of 414B06 | GACATCCAGATGACCCAGTCTCCATCTTCCGTGTCTGCATCTGTAGGAGACAGA |
| | chain sequence | | light chain | GTCACCATCACTTGTCGGGCGAGTCAGGGTATTAGCAGCTGGTTAGCCTGGTAT |
| | | | | CAGCAGAAACCAGGGAAAGCCCCTAAGCTCCTGATCTATGCTGCATCCAGTTTG |
| | | | | CAAAGTGGGGTCCCATCAAGGTTCAGCGGCAGTGGATCTGGGACAGATTTCACT |
| | | | | CTCACCATCAGCAGCCTGCAGCCTGAAGATTTTGCAACTTACTATTGTCAACAGG |
| | | | | CTAACAGTTTCCCATTCACTTTCGGCCCTGGGACCAAAGTGGATATCAAACGTAC |
| | | | | GGTGGCCGCTCCCTCCGTGTTCATCTTCCCACCTTCCGACGAGCAGCTGAAGTC |
| | | | | CGGCACCGCTTCTGTCGTGTGCCTGCTGAACAACTTCTACCCCCGCGAGGCCAA |
| | | | | GGTGCAGTGGAAGGTGGACAACGCCCTGCAGTCCGGCAACTCCCAGGAATCCGT |
| | | | | GACCGAGCAGGACTCCAAGGACAGCACCTACTCCCTGTCCTCCACCCTGACCCT |
| | | | | GTCCAAGGCCGACTACGAGAAGCACAAGGTGTACGCCTGCGAAGTGACCCACCA |
| | | | | GGGCCTGTCTAGCCCCGTGACCAAGTCTTTCAACCGGGGCGAGTGT |
| 298 | Mutated 1D05-LC | | Amino acid sequence of 1D05 | DIQMTQSPSSLSASVGDRVTITCRASQSISSYLNWYQQKPGKAPKLLIYYASSLQS |
| | mutant 3 | | kappa light chain with V to Y | GVPSRFSGSGSGTDFILTISSLQPEDFATYYCQQSYSTPITFGQGTRLEIKRIVAAP |
| | | | mutation in CDRL2 highlighted | SVFIFPPSDEQLKSGTASVVCLLNNFYPREAKVQWKVDNALQSGNSQESVTEQDSK |
| | | | | DSTYSLSSTLTLSKADYEKHKVYACEVTHQGLSSPVTKSFNRGEC |
| 299 | 1D05-heavy chain | | Amino acid sequence of IgG1 | EVQLVESGGGLVQPGRSLRLSCAASGFTFDDYAMHWVRQVPGKGLEWVSGISWI |
| | disabled IgG1 Fc | | disabled variant of 1D05 | RTGIGYADSVKGRFTIFRDNAKNSLYLQMNSLRAEDTALYYCAKDMKGSGTYGGW |
| | | | | FDTWGQGTLVTVSSASTKGPSVFPLAPSSKSTSGGTAALGCLVKDYFPEPVTVSWN |
| | | | | SGALTSGVHTFPAVLQSSGLYSLSSVVTVPSSSLGTQTYICNVNHKPSNTINDKKVE |
| | | | | PKSCDKTHTCPPCPAPELAGAPSVFLFPPKPKDTLMISRTPEVTCVVVDVSHEDPE |
| | | | | VKFNWYVDGVEVHNAKTKPREEQYNSTYRVVSVLTVLHQDWLNGKEYKCKVSNK |
| | | | | ALPAPIEKTISKAKGQPREPQVYTLPPSRDELTKNQVSLTCLVKGFYPSDIAVEWES |
| | | | | NGQPENNYKTTPPVLDSDGSFFLYSKLTVDKSRWQQGNVFSCSVMHEALHNHYT |
| | | | | QKSLSLSPGK |
| 300 | 1D05-light chain IL-2 | | 1D05 Light chain sequence fused | DIQMTQSPSSLSASVGDRVTITCRASQSISSYLNWYQQKPGKAPKLLIYVASSLQS |
| | fusion | | to wild-type human IL-2 | GVPSRFSGSGSGTDFTLTISSLQPEDFATYYCQQSYSTPITFGQGTRLEIKRTVAAP |
| | | | sequence (IL-2 amino acid | SVFIFPPSDEQLKSGTASVVCLLNNFYPREAWQWKVDNALQSGNSQESVTEQDSK |
| | | | sequence is underlined and | DSTYSLSSTLTLSKADYEKHKVYACEVTHQGLSSPVTKSFNRGECAPTSSSTKKT |
| | | | region to be varied is shown in | QLQLEHLLLDLQMILNGINNYKNPKLTRMLTFKFYMPKKATELKHLQCLEEELKPL |
| | | | bold) | EEVLNLAQSKNFHLRPRDLISNINVIVLELKGSETTFMCEYADETATIVEFLNRWITF |
| | | | | CQSIISTLT |
| 301 | Human IL-2 | | Uniprot number: P60568 | APTSSSTKKTQLQLEHLLLDLQMILNGINNYKNPKLTRMLTFKFYMPKKATELK |
| | | | Full length amino acid sequence | HLQCLEEELKPLEEVLNLAQSKNFHLRPRDLISNINVIVLELKGSETTFMCEYADETA |
| | | | of human IL-2 (minus signal | TIVEFLNRWITFCQSIISTLT |
| | | | sequence) | |
| 302 | Control 1D05 | | Heavy chain 1D05 IgG1 variant | EVQLVESGGGLVQPGRSLRLSCAASGFTFDDYAMHWVRQVPGKGLEWVSGISWI |
| | immunocytokine HC C- | | fused at the N-terminus to | RTGIGYADSVKGRFTIFRDNAKNSLYLQMNSLRAEDTALYYCAKDMKGSGTYGGW |
| | terminal fusion | | wild-type human IL2 sequence | FDTWGQGTLVTVSSASTKGPSVFPLAPSSKSTSGGTAALGCLVKDYFPEPVTVSWN |
| | | | (control) | SGALTSGVHTFPAVLQSSGLYSLSSVVTVPSSSLGTQTYICNVNHKPSNTKVDKKVE |
| | | | | PKSCDKTHTCPPCPAPELAGAPSVFLFPPKPKDTLMISRTPEVTCVVVDVSHEDPE |
| | | | | VKFNWYVDGVEVHNAKTKPREEQYNSTYRVVSVLTVLHQDWLNGKEYKCKVSNK |
| | | | | ALPAPIEKTISKAKGQPREPQVYTLPPSRDELTKNQVSLTCLVKGFYPSDIAVEWES |
| | | | | NGQPENNYKTIPPVLDSDGSFFLYSKLTVDKSRWQQGNVFSCSVMHEALHNHYT |
| | | | | QKSLSLSPGKAPTSSSTKKTQLQLEHLLLDLQMILNGINNYKNPKLTRMLTFKFYMP |
| | | | | KKATELKHLQCLEEELKPLEEVLNLAQSKNFHLRPRDLISNINVIVLELKGSETTFMC |
| | | | | EYADETATIVEFLNRWITFCQSIISTLT |
| 303 | IL-2 D5-9 | | IL-2 IC45 (Del 5-9) N terminal | APTSTQLQLELLLD |
| | | | IL-2 sequence | |
| 304 | IL-2 D1-9 | | IL-2 IC46 (Del 1-9) N terminal | TQLQLEHLLLD |
| | | | IL-2 sequence | |
| 305 | IL-2 D5-7 | | IL-2 IC64 (Del 5-7) N terminal | APTSKKTQLQLEHLLLD |
| | | | IL-2 sequence | |
| 306 | IL-2 D1 | | IL-2 D1 N terminal IL-2 | PTSSSTKKTQLQLEHLLLD |
| | | | sequence | |
| 307 | IL-2 D1-2 | | IL-2 D1-2 N terminal IL-2 | TSSSTKKTQLQLEHLLLD |
| | | | sequence | |
| 308 | IL-2 D1-3 | | IL-2 D1-3 N terminal IL-2 | SSSTKKTQLQLEHLLLD |
| | | | sequence | |
| 309 | IL-2 D1-4 | | IL-2 D1-4 N terminal IL-2 | SSTKKTQLQLEHLLLD |
| | | | sequence | |
| 310 | IL-2 D1-5 | | IL-2 D1-5 N terminal IL-2 | STKKTQLQLEHLLLD |
| | | | sequence | |
| 311 | IL-2 D1-6 | | IL-2 D1-6 N terminal IL-2 | TKKTQLQLEHLLLD |
| | | | sequence | |
| 312 | IL-2 D1-7 | | IL-2 D1-7 N terminal IL-2 | KKTQLQLEHLLLD |
| | | | sequence | |
| 313 | IL-2 D1-8 | | IL-2 D1-8 N terminal IL-2 | KTQLQLEHLLLD |
| | | | sequence | |
| 314 | IL-2 D9 | | IL-2 D9 N terminal IL-2 | APTSSSTKTQLQLEHLLLD |
| | | | sequence | |
| 315 | IL-2 D9-8 | | IL-2 D9-8 N terminal IL-2 | APTSSSTTQLQLEHLLLD |
| | | | sequence | |
| 316 | IL-2 D9-7 | | IL-2 D9-7 N terminal IL-2 | APTSSSTQLQLEHLLLD |
| | | | sequence | |
| 317 | IL-2 D9-6 | | IL-2 D9-6 N terminal IL-2 | APTSSTQLQLEHLLLD |
| | | | sequence | |
| 318 | IL-2 D9-4 | | IL-2 D9-4 N terminal IL-2 | APTTQLQLEHLLLD |
| | | | sequence | |
| 319 | IL-2 D9-3 | | IL-2 D9-3 N terminal IL-2 | APTQLQLEHLLLD |
| | | | sequence | |
| 320 | IL-2 D9-2 | | IL-2 D9-2 N terminal IL-2 | ATQLQLEHLLLD |
| | | | sequence | |
| 321 | IL-2 D2-6 | | IL-2 D2-6 N terminal IL-2 | ATKKTQLQLEHLLLD |
| | | | sequence | |
| 322 | IL-2 D3-7 | | IL-2 D3-7 N terminal IL-2 | APKKTQLQLEHLLLD |
| | | | sequence | |
| 323 | IL-2 D4-8 | | IL-2 D4-8 N terminal IL-2 | APTKTQLQLEHLLLD |
| | | | sequence | |
| 324 | C-terminal amino acid | | Amino acids 21 to 133 of hIL-2 | LQMILNGINNYKNPKLTRMLTFKFYMPKKATELKHLQCLEEELKPLEEVLNLAQSKN |
| | sequence of hIL-2 | | | FHLRPRDLISNINVIVLELKGSETTFMCEYADETATIVEFLNRWITFCQSIISTLT |
| 325 | Mouse PD-L1 | | Uniprot number: Q9EP73 | MRIFAGIIFTACCHLLRAFTITAPKDLYWEYGSNVTMECRFPVERELDLLAL |
| | | | (ECD highlighted in BOLD, and | VVYWEKEDEQVIQFVAGEEDLKPQHSNFRGRASLPKDQLLKGNAALQIT |
| | | | cytoplasmic domain underlined) | DVKLQDAGVYCCIISYGGADYKRITLKVNAPYRKINQRISVDPATSEHEL |
| | | | | ICQAEGYPEAEVIWTNSDHQPVSGKRSVTTSRTEGMLLNVTSSLRVNAT |
| | | | | ANDVFYCTFWRSQPGQNHTAELIIPELPATHPPQNRTHWVLLGSILLFLIW |
| | | | | STVLLFLRKQVRMLDVEKCGVEDTSSKNRNDTQFEET |
| 326 | Mouse PD-L1 ECD His | | Mouse PD-L1 extracellular | FTITAPKDLYVVEYGSNVTMECRFPVERELDLLALVVYWEKEDEQVIQFVAGEEDLK |
| | | | domain with his tag | PQHSNFRGRASLPKDQLLKGNAALQITDVKLQDAGVYCCIISYGGADYKRITLKVN |
| | | | | APYRKINQRISVDPATSEHELICQAEGYPEAEVIWTNSDHQPVSGKRSVTTSRTEG |
| | | | | MLLNVTSSLRVNATANDVFYCTFWRSQPGQNHTAELIIPELPATHPPQNRTHHHH |
| | | | | HH |
| 327 | Human IL-2Ra chain | | Human IL-2 receptor alpha chain | ELCDDDPPEIPHATFKAMAYKEGTMLNCECKRGFRRIKSGSLYMLCIGNSSHSSW |
| | | | | DNQCQCTSSATRNTTKQVTPQPEEQKERKTTEMQSPMQPVDQASLPGHCREPPP |
| | | | | WENEATERIYHFWGQMVYYQCVQGYRALHRGPAESVCKMTHGKTRWTQPQLIC |
| | | | | TGEMETSQFPGEEKPQASPEGRPESETSCLVTTTDFQIQTEMAATMETSIFTTEYQ |
| | | | | VAVAGCVFLLISVLLLSGLTWQRRQRKSRRTI |
| 328 | Human IL-2R8 chain | | Human IL-2 receptor beta chain | AVNGTSQFTCFYNSRANISCVWSQDGALQDTSCQVHAWPDRRRWNQTCELLPVS |
| | | | | QASWACNLILGAPDSQKLTTVDIVTLRVLCREGVRWRVMAIQDFKPFENLRLMAPI |
| | | | | SLQVVHVETHRCNISWEISQASHYFERHLEFEARTLSPGHTWEEAPLLTLKQKQE |
| | | | | WICLETLTPDTQYEFQVRVKPLQGEFTTWSPWSQPLAFRTKPAALGKDTIPWLGH |
| | | | | LLVGLSGAFGFIILVYLLINCRNTGPWLKINLKCNTPDPSKFFSQLSSEHGGDVQKW |
| | | | | LSSPFPSSSFSPGGLAPEISPLEVLERDKVTQLLLQQDKVPEPASLSSNHSLTSCFTN |
| | | | | QGYFFFHLPDALEIEACQVYFTYDPYSEEDPDEGVAGAPTGSSPQPLQPLSGEDDA |
| | | | | YCTFPSRDDLLLFSPSLLGGPSPPSTAPGGSGAGEERMPPSLQERVPRDWDPQPLG |
| | | | | PPTPGVPDLVDFQPPPELVLREAGEEVPDAGPREGVSFPWSRPPGQGEFRALNARL |
| | | | | PLNTDAYLSLQELQGQDPTHLV |
| 329 | Human IL-2Ry chain | | Human IL-2 receptor common | LNTTILTPNGNEDTTADFFLTTMPTDSLSVSTLPLPEVQCFVFNVEYMNCTWNSSS |
| | | | gamma chain | EPQPTNLTLHYWYKNSDNDINQKCSHYLFSEEITSGCQLQKKEIHLYQTFVVQLQD |
| | | | | PREPRRQATQMLKLQNLVIPWAPENLTLHKLSESQLELNWNNRFLNHCLEHLVQY |
| | | | | RTDWDHSWTEQSVDYRHKFSLPSVDGQKRYTFRVRSRFNPLCGSAQHWSEWSH |
| | | | | PIHWGSNTSKENPFLFALEAWISVGSMGLIISLLCVYFWLERTMPRIPTLKNLEDLV |
| | | | | TEYHGNFSAWSGVSKGLAESLQPDYSERLCLVSEIPPKGGALGEGPGASPCNQHSP |
| | | | | YWAPPCYTLKPET |
| 330 | IL-7 | | Human IL-7 amino acid sequence | DCDIEGKDGKQYESVLMVSIDQLLDSMKEIGSNCLNNEFNFFKRHICDANKEGMFL |
| | | | | FRAARKLRQFLKMNSTGDFDLHLLKVSEGTTILLNCTGQVKGRKPAALGEAQPTKS |
| | | | | LEENKSLKEQKKLNDLCFLKRLLQEIKTCWNKILMGTKEH |
| 331 | IL-15 | | Human IL-15 amino acid | GIHVFILGCFSAGLPKTEANWVNVISDLKKIEDLIQSMHIDATLYTESDVHPSCKVT |
| | | | sequence | AMKCELLELQVISLESGDASIHDTVENLIILANNSLSSNGNVTESGCKECEELEEKNI |
| | | | | KEFLQSFVHIVQMFINTS |
| 332 | IL-21 | | Human IL-21 amino acid | QGQDRHMIRMRQLIDIVDQLKNYVNDLVPEFLPAPEDVETNCEWSAFSCFQKAQL |
| | | | sequence | KSANTGNNERIINVSIKKLKRKPPSTNAGRRQKHRLTCPSCDSYEKKPPKEFLERFK |
| | | | | SLLQKMIHQHLSSRTHGSEDS |
| 333 | GM-CSF | | Human GM-CSF amino acid | APARSPSPSTQPWEHVNAIQEARRLLNLSRDTAAEMNETVEVISEMFDLQEPTCLQ |
| | | | sequence | TRLELYKQGLRGSLTKLKGPLTMMASHYKQHCPPTPETSCATQIITFESFKENLKDF |
| | | | | LLVIPFDCWEPVQE |
| 334 | IFNa | | Human IFN-a amino acid | CDLPQNHGLLSRNTLVLLHQMRRISPFLCLKDRRDERFPQEMVKGSQLQKAHVMS |
| | | | sequence | VLHEMLQQIFSLFHTERSSAAWNMTLLDQLHTELHQQLQHLETCLLQVVGEGESA |
| | | | | GAISSPALTLRRYFQGIRVYLKEKKYSDCAWEVVRMEIMKSLELSTNMQERLRSKD |
| | | | | RDLGS |
| 335 | TNFa | | Extracellular portion of human | GPQREEFPRDLSLISPLAQAVRSSSRTPSDKPVAHVVANPQAEGQLQWLNRRANAL |
| | | | TNF-a amino acid sequence | LANGVELRDNQLVVPSEGLYLIYSQVLFKGQGCPSTHVLLTHTISRIAVSYQTKVNL |
| | | | | LSAIKSPCQRETPEGAEAKPWYEPIYLGGVFQLEKGDRLSAEINRPDYLDFAESGQV |
| | | | | YFGIIAL |
| 336 | IL-12a | | Alpha chain of human IL-12 | RNLPVATPDPGMFPCLHHSQNLLRAVSNMLQKARQTLEFYPCTSEEIDHEDITKDK |
| | | | amino acid sequence | TSTVEACLPLELTKNESCLNSRETSFITNGSCLASRKTSFMMALCLSSIYEDLKMYQ |
| | | | | VEEKTMNAKLLMDPKRQIELDQNMLAVIDELMQALNFNSETVPQKSSLEEPDFYKT |
| | | | | KIKLCILLHAFRIRAVTIDRVMSYLNAS |
| 337 | IL-1213 | | Beta chain of human IL-12 amino | IWELKKDVYVVELDWYPDAPGEMVVLICDTPEEDGITWTLDQSSEVLGSGKTLTI |
| | | | acid sequence | QVKEFGDAGQYTCHKGGEVLSHSLLLLHKKEDGIWSTDILKDQKEPKNKTFLRCEA |
| | | | | KNYSGRETCWWLTTISTDLTESVKSSRGSSDPQGVTCGAATLSAERVRGDNKEYE |
| | | | | YSVECQEDSACPAAEESLPIEVMVDAVHKLKYENYTSSFFIRDIIKPDPPKNLQLKPL |
| | | | | KNSRQVEVSWEYPDTWSTPHSYFSLTFCVQVQGKSKREKKDRVETDKTSATVICR |
| | | | | KNASISVRAQDRYYSSSWSEWASVPCS |
| 338 | CXCL9 | | Human CXCL-9 amino acid | TPVVRKGRCSCISTNQGTIHLQSLKDLKQEAPSPSCEKIEIIATLKNGVQTCLNPDSA |
| | | | sequence | DVKELIKKWEKQVSQKKKQKNGKKHQKKKVLWRKSQRSRQKKTT |
| 339 | CXCL10 | | Human CXCL-10 amino acid | VPLSRTVRCTCISISNQPVNPRSLEKLEIIPASQFCPRVEIIATMKKKGEKRCLNPESK |
| | | | sequence | AIKNLLKAVSKERSKRSP |
| 340 | Human WT | IGHG1* | WT human IgG1 amino acid | ASTKGPSVFPLAPSSKSTSGGTAALGCLVKDYFPEPVTVSWNSGALTSGVHTFPAVL |
| | IgG1 | 01 & | sequence | QSSGLYSLSSVVTVPSSSLGTQTYICNVNHKPSNTKVDKKVEPKSCDKTHTCPPCP |
| | constant | IGHG1* | | APELLGGPSVFLEPPKPKDILMISRTPEVTGANDVSHEDPEVKFNWYVDGVEVHN |
| | region | 02 & | | AKTKPREEQYNSTYRWSVLTVLHQDWLNGKEYKCKVSNKALPAPIEKTISKAKGQ |
| | | IGHG1* | | PREPQVYTLPPSRDELTKNQVSLTCLVKGFYPSDIAVEWESNGQPENNYKTTPPVL |
| | | 05 | | DSDGSFFLYSKLTVDKSRWQQGNVFSCSVMHEALHNHYTQKSLSLSPGK |
| | | (IgG1) | | |
| 341 | | | WT human IgG1 nucleic acid | GCCAGCACCAAGGGCCCCTCTGTGTTCCCTCTGGCCCTTCCAGCAAGTCCACC |
| | | | sequence | TCTGGCGGAACAGCCGCTCTGGGCTGCCTCGTGAAGGACTACTTCCCCGAGCCT |
| | | | | GTGACCGTGTCCTGGAACTCTGGCGCTCTGACCAGCGGAGTGCACACCTTCCCT |
| | | | | GCTGTGCTGCAGTCCTCCGGCCTGTACTCCCTGTCCTCCGTCGTGACCGTGCCT |
| | | | | TCCAGCTCTCTGGGCACCCAGACCTACATCTGCAACGTGAACCACAAGCCCTCCA |
| | | | | ACACCAAGGTGGACAAGAAGGTGGAACCCAAGTCCTGCGACAAGACCCACACCT |
| | | | | GTCCCCCTTGTCCTGCCCCTGAACTGCTGGGCGGACCTTCCGTGTTCCTGTTCC |
| | | | | CCCCAAAGCCCAAGGACACCCTGATGATCTCCCGGACCCCCGAAGTGACCTGCG |
| | | | | TGGTGGTGGATGTGTCCCACGAGGACCCTGAAGTGAAGTTCAATTGGTACGTGG |
| | | | | ACGGCGTGGAAGTGCACAACGCCAAGACCAAGCCTAGAGAGGAACAGTACAACT |
| | | | | CCACCTACCGGGTGGTGTCCGTGCTGACCGTGCTGCACCAGGATTGGCTGAACG |
| | | | | GCAAAGAGTACAAGTGCAAGGTGTCCAACAAGGCCCTGCCTGCCCCCATCGAAA |
| | | | | AGACCATCTCCAAGGCCAAGGGCCAGCCCCGGGAACCCCAGGTGTACACACTGC |
| | | | | CCCCTAGCAGGGACGAGCTGACCAAGAACCAGGTGTCCCTGACCTGTCTCGTGA |
| | | | | AAGGCTTCTACCCCTCCGATATCGCCGTGGAATGGGAGTCCAACGGCCAGCCTG |
| | | | | AGAACAACTACAAGACCACCCCCCCTGTGCTGGACTCCGACGGCTCATTCTTCCT |
| | | | | GTACAGCAAGCTGACAGTGGACAAGTCCCGGTGGCAGCAGGGCAACGTGTTCTC |
| | | | | CTGCTCCGTGATGCACGAGGCCCTGCACAACCACTACACCCAGAAGTCCCTGTC |
| | | | | CCTGAGCCCCGGCAAGTGATGA |
| 342 | Mutated 1D05-HC | | Amino acid sequence of 1D05 | EVQLVESGGGLVQPGRSLRLSCAASGFTFDDYAMHWVRQAPGKGLEWVSGISWI |
| | mutant 2 | | heavy chain with V to A and F | RTGIGYADSVKGRFTISRDNAKNSLYLQMNSLRAEDTALYYCAKDMKGSGTYGGW |
| | | | to S back-mutation in framework | FDTWGQGTLVTVSSASTKGPSVFPLAPCSRSTSESTAALGCLVKDYFPEPVWSWN |
| | | | region to germline highlighted | SGALTSGVHTFPAVLQSSGLYSLSSVVTVPSSSLGTKTYTCNVDHKPSNTKVDKRV |
| | | | with IgG1 disabled (LAGA) | ESKYGPPCPPCPAPELAGAPSVFLFPPKPKDTLMISRTPEVTCVVVDVSQEDPEVQF |
| | | | constant region | NWYVDGVEVHNAKTKPREEQFNSTYRVVSVLTVLHQDWLNGKEYKCKVSNKGLP |
| | | | | SSIEKTISKAKGQPREPQVYTLPPSQEEMTKNQVSLTCLVKGFYPSDIAVEWESNG |
| | | | | QPENNYKTTPPVLDSDGSFFLYSRLTVDKSRWQEGNVFSCSVMHEALHNHYTQKS |
| | | | | LSLSLGK |
| 343 | 416E01-CDRH1 | | Amino acid sequence of CDRH1 | GFTFSNYA |
| | (IMGT) | | of 416E01 using IMGT | |
| 344 | 416E01-CDRH2 | | Amino acid sequence of CDRH2 | ISFSGGTT |
| | (IMGT) | | of 416E01 using IMGT | |
| 345 | 416E01-CDRH3 | | Amino acid sequence of CDRH3 | AKDEAPAGATFFDS |
| | (IMGT) | | of 416E01 using IMGT | |
| 346 | 416E01-CDRH1 | | Amino acid sequence of CDRH1 | NYAMS |
| | (Kabat) | | of 416E01 using Kabat | |
| 347 | 416E01-CDRH2 | | Amino acid sequence of CDRH2 | AISFSGGTTYYADSVKG |
| | (Kabat) | | of 416E01 using Kabat | |
| 348 | 416E01-CDRH3 | | Amino acid sequence of CDRH3 | DEAPAGATFFDS |
| | (Kabat) | | of 416E01 using Kabat | |
| 349 | 416E01-Heavy chain | | Amino acid sequence of V_{H} of | EVQLAESGGGLVQPGGSLRLSCAASGFTFSNYAMSWVRQTPGKGLEWVSAISFSG |
| | variable region | | 416E01 (mutations from | GTTYYADSVKGRFTISRDNSKNTLYLHMNSLRADDTAVYYCAKDEAPAGATFFD |
| | | | germline are shown in | SWGQGTLVTVSS |
| | | | bold letters) | |
| 350 | 416E01-Heavy chain | | Nucleic acid sequence of V_{H} of | GAAGTGCAACTGGCGGAGTCTGGGGGAGGCTTGGTACAGCCGGGGGGGTCCCT |
| | variable region | | 416E01 | GAGACTCTCCTGTGCAGCCTCTGGATTCACCTTTAGCAACTATGCCATGAGTTG |
| | | | | GGTCCGCCAGACTCCAGGAAAGGGGCTGGAGTGGGTCTCAGCTATTAGTTTTAG |
| | | | | TGGTGGTACTACATACTACGCTGACTCCGTGAAGGGCCGGTTCACCATCTCCAG |
| | | | | AGACAATTCCAAGAACACGCTGTATTTGCACATGAACAGCCTGAGAGCCGATGA |
| | | | | CACGGCCGTATATTACTGTGCGAAAGATGAGGCACCAGCTGGCGCAACCTTCTT |
| | | | | TGACTCCTGGGGCCAGGGAACGCTGGTCACCGTCTCCTCAG |
| 351 | 416E01-full heavy | | Amino acid sequence of 416E01 | EVQLAESGGGLVQPGGSLRLSCAASGFTFSNYAMSWVRQTPGKGLEWVSAISFSG |
| | chain sequence | | heavy chain | GTTYYADSVKGRFTISRDNSKNTLYLHMNSLRADDTAVYYCAKDEAPAGATFFDS |
| | | | | WGQGTLVTVSSASTKGPSVFPLAPCSRSTSESTAALGCLVKDYFPEPVTVSWNSGA |
| | | | | LTSGVHTFPAVLQSSGLYSLSSVVTVPSSSLGTKTYTCNVDHKPSNTINDKRVESKY |
| | | | | GPPCPPCPAPEFEGGPSVFLFPPKPKDTLMISRTPEVTCVVVDVSQEDPEVQFNWY |
| | | | | VDGVEVHNAKTKPREEQFNSTYRVVSVLTVLHQDWLNGKEYKCKVSNKGLPSSIEK |
| | | | | TISKAKGQPREPQVYTLPPSQEEMTKNQVSLTCLVKGFYPSDIAVEWESNGQPENN |
| | | | | YKTTPPVLDSDGSFFLYSRLIVDKSRWQEGNVFSCSVMHEALHNHYTQKSLSLSLG |
| | | | | K |
| 352 | 416E01-full heavy | | Nucleic acid sequence of 416E01 | GAAGTGCAACTGGCGGAGTCTGGGGGAGGCTTGGTACAGCCGGGGGGGTCCCT |
| | chain sequence | | heavy chain | GAGACTCTCCTGTGCAGCCTCTGGATTCACCTTTAGCAACTATGCCATGAGTTG |
| | | | | GGTCCGCCAGACTCCAGGAAAGGGGCTGGAGTGGGTCTCAGCTATTAGTTTTAG |
| | | | | TGGTGGTACTACATACTACGCTGACTCCGTGAAGGGCCGGTTCACCATCTCCAG |
| | | | | AGACAATTCCAAGAACACGCTGTATTTGCACATGAACAGCCTGAGAGCCGATGA |
| | | | | CACGGCCGTATATTACTGTGCGAAAGATGAGGCACCAGCTGGCGCAACCTTCTT |
| | | | | TGACTCCTGGGGCCAGGGAACGCTGGTCACCGTCTCCTCAGCCAGCACCAAGGG |
| | | | | CCCTTCCGTGTTCCCCCTGGCCCCTTGCAGCAGGAGCACCTCCGAATCCACAGC |
| | | | | TGCCCTGGGCTGTCTGGTGAAGGACTACTTTCCCGAGCCCGTGACCGTGAGCTG |
| | | | | GAACAGCGGCGCTCTGACATCCGGCGTCCACACCTTTCCTGCCGTCCTGCAGTC |
| | | | | CTCCGGCCTCTACTCCCTGTCCTCCGTGGTGACCGTGCCTAGCTCCTCCCTCGG |
| | | | | CACCAAGACCTACACCTGTAACGTGGACCACAAACCCTCCAACACCAAGGTGGAC |
| | | | | AAACGGGTCGAGAGCAAGTACGGCCCTCCCTGCCCTCCTTGTCCTGCCCCCGAG |
| | | | | TTCGAAGGCGGACCCAGCGTGTTCCTGTTCCCTCCTAAGCCCAAGGACACCCTC |
| | | | | ATGATCAGCCGGACACCCGAGGTGACCTGCGTGGTGGTGGATGTGAGCCAGGA |
| | | | | GGACCCTGAGGTCCAGTTCAACTGGTATGTGGATGGCGTGGAGGTGCACAACG |
| | | | | CCAAGACAAAGCCCCGGGAAGAGCAGTTCAACTCCACCTACAGGGTGGTCAGCG |
| | | | | TGCTGACCGTGCTGCATCAGGACTGGCTGAACGGCAAGGAGTACAAGTGCAAG |
| | | | | GTCAGCAATAAGGGACTGCCCAGCAGCATCGAGAAGACCATCTCCAAGGCTAAA |
| | | | | GGCCAGCCCCGGGAACCTCAGGTGTACACCCTGCCTCCCAGCCAGGAGGAGATG |
| | | | | ACCAAGAACCAGGTGAGCCTGACCTGCCTGGTGAAGGGATTCTACCCTTCCGAC |
| | | | | ATCGCCGTGGAGTGGGAGTCCAACGGCCAGCCCGAGAACAATTATAAGACCACC |
| | | | | CCTCCCGTCCTCGACAGCGACGGATCCTTCTTTCTGTACTCCAGGCTGACCGTG |
| | | | | GATAAGTCCAGGTGGCAGGAAGGCAACGTGTTCAGCTGCTCCGTGATGCACGAG |
| | | | | GCCCTGCACAATCACTACACCCAGAAGTCCCTGAGCCTGTCCCTGGGAAAG |
| 353 | 416E01-CDRL1 | | Amino acid sequence of CDRL1 | QGIRRW |
| | (IMGT) | | of 416E01 using IMGT | |
| 354 | 416E01-CDRL2 | | Amino acid sequence of CDRL2 | GAS |
| | (IMGT) | | of 416E01 using IMGT | |
| 355 | 416E01-CDRL3 | | Amino acid sequence of CDRL3 | QQANSFPIT |
| | (IMGT) | | of 416E01 using IMGT | |
| 356 | 416E01-CDRL1 | | Amino acid sequence of CDRL1 | RASQGIRRWLA |
| | (Kabat) | | of 416E01 using Kabat | |
| 357 | 416E01-CDRL2 | | Amino acid sequence of CDRL2 | GASSLQS |
| | (Kabat) | | of 416E01 using Kabat | |
| 358 | 416E01-CDRL3 | | Amino acid sequence of CDRL3 | QQANSFPIT |
| | (Kabat) | | of 416E01 using Kabat | |
| 359 | 416E01-Light chain | | Amino acid sequence of V_{L} of | DIQMTQSPSSVSASVGDRVTITCRASQGIRRWLAWYQQKPGKAPKLLISGASSLQ |
| | variable region | | 416E01 (mutations from germline | SGVPSRFSGSGSGTDFTLIITSLQPEDFATYYCQQANSFPITFGQGTRLEIK |
| | | | are shown in bold letters) | |
| 360 | 416E01-Light chain | | Nucleic acid sequence of V_{L} of | GACATCCAGATGACCCAGTCTCCATCTTCCGTGTCTGCATCTGTAGGAGACAGA |
| | variable region | | 416E01 | GTCACCATCACTTGTCGGGCGAGTCAGGGTATTAGGAGGTGGTTAGCCTGGTAT |
| | | | | CAGCAGAAACCAGGGAAAGCCCCTAAACTCCTGATCTCTGGTGCATCCAGTTTG |
| | | | | CAAAGTGGGGTCCCATCAAGGTTCAGCGGCAGTGGATCTGGGACAGATTTCACT |
| | | | | CTCATCATTACCAGTCTGCAGCCTGAAGATTTTGCAACTTACTATTGTCAACAGG |
| | | | | CTAACAGTTTCCCGATCACCTTCGGCCAAGGGACACGACTGGAGATCAAAC |
| 361 | 416E01-full light | | Amino acid sequence of 416E01 | DIQMTQSPSSVSASVGDRVTITCRASQGIRRWLAWYQQKPGKAPKLLISGASSLQS |
| | chain sequence | | light chain | GVPSRFSGSGSGTDFTLIITSLQPEDFATYYCQQANSFPITFGQGTRLEIKRTVAAP |
| | | | | SVFIFPPSDEQLKSGTASVVCENNFYPREAKWWKVDNALQSGNSQESVTEQDSK |
| | | | | DSTYSLSSTLTLSKADYEKHKVYACEVTHQGLSSPVTKSFNRGEC |
| 362 | 416E01-full light | | Nucleic add sequence of 416E01 | GACATCCAGATGACCCAGTCTCCATCTTCCGTGTCTGCATCTGTAGGAGACAGA |
| | chain sequence | | light chain | GTCACCATCACTTGTCGGGCGAGTCAGGGTATTAGGAGGTGGTTAGCCTGGTAT |
| | | | | CAGCAGAAACCAGGGAAAGCCCCTAAACTCCTGATCTCTGGTGCATCCAGTTTG |
| | | | | CAAAGTGGGGTCCCATCAAGGTTCAGCGGCAGTGGATCTGGGACAGATTTCACT |
| | | | | CTCATCATTACCAGTCTGCAGCCTGAAGATTTTGCAACTTACTATTGTCAACAGG |
| | | | | CTAACAGTTTCCCGATCACCTTCGGCCAAGGGACACGACTGGAGATCAAACGTA |
| | | | | CGGTGGCCGCTCCCTCCGTGTTCATCTTCCCACCTTCCGACGAGCAGCTGAAGT |
| | | | | CCGGCACCGCTTCTGTCGTGTGCCTGCTGAACAAATTTACCCCCGCGAGGCCA |
| | | | | AGGTGCAGTGGAAGGTGGACAACGCCCTGCAGTCCGGCAACTCCCAGGAATCCG |
| | | | | TGACCGAGCAGGACTCCAAGGACAGCACCTACTCCCTGTCCTCCACCCTGACCC |
| | | | | TGTCCAAGGCCGACTACGAGAAGCACAAGGTGTACGCCTGCGAAGTGACCCACC |
| | | | | AGGGCCTGTCTAGCCCCGTGACCAAGTCTTTCAACCGGGGCGAGTGT |
| 363 | STIM001-CDRH1 | | Amino acid sequence of CDRH1 | GYTFSTFG |
| | | | of STIM001 using IMGT | |
| 364 | STIM001-CDRH2 | | Amino acid sequence of CDRH2 | ISAYNGDT |
| | | | of STIM001 using IMGT | |
| 365 | STIM001-CDRH3 | | Amino acid sequence of CDRH3 | ARSSGHYYYYGMDV |
| | | | of STIM001 using IMGT | |
| 366 | STIM001-Heavy | | Amino acid sequence of V_{H} of | QVQVVQSGAEVKKPGASVKVSCKASGYTFSTFGITWVRQAPGQGLEWMGWISAY |
| | chain variable region | | STIM001 | NGDTNYAQNLQGRVIMTTDTSTSTAYMELRSLRSDDTAVYYCARSSGHYYYYGM |
| | | | | DVWGQGTTVTVSS |
| 367 | STIM001-Heavy | | Nucleic acid sequence of V_{H} of | CAGGTTCAGGTGGTGCAGTCTGGAGCTGAGGTGAAGAAGCCTGGGGCCTCAGT |
| | chain variable region | | STIM001 | GAAGGTCTCCTGCAAGGCTTCTGGTTACACCTTTTCCACCTTTGGTATCACCTGG |
| | | | | GTGCGACAGGCCCCTGGACAAGGGCTTGAATGGATGGGATGGATCAGCGCTTA |
| | | | | CAATGGTGACACAAACTATGCACAGAATCTCCAGGGCAGAGTCATCATGACCAC |
| | | | | AGACACATCCACGAGCACAGCCTACATGGAGCTGAGGAGCCTGAGATCTGACGA |
| | | | | CACGGCCGTTTATTACTGTGCGAGGAGCAGTGGCCACTACTACTACTACGGTAT |
| | | | | GGACGTCTGGGGCCAAGGGACCACGGTCACCGTCTCCTCA |
| 368 | STIM001-full heavy | | Amino acid sequence of STIM001 | QVQVVQSGAEVKKPGASVKVSCKASGYTFSTFGITWVRQAPGQGLEWMGWISAY |
| | chain sequence | | heavy chain | NGDTNYAQNLQGRVIMTTDTSTSTAYMELRSLRSDDTAVYYCARSSGHYYYYGM |
| | | | | DVWGQGTTVTVSSASTKGPSVFPLAPSSKSTSGGTAALGCLVKDYFPEPVTVSWN |
| | | | | SGALTSGVHTFPAVLQSSGLYSLSSVVTVPSSSLGTQTYICNVNHKPSNTKVDKKVE |
| | | | | PKSCDKTHTCPPCPAPELLGGPSVFLFPPKPKDTLMISRTPEVTCVVVDVSHEDPEV |
| | | | | KFNWYVDGVEVHNAKTKPREEQYNSTYRVVSVLTVLHQDWLNGKEYKCKVSNKA |
| | | | | LPAPIEKTISKAKGQPREPQVYTLPPSRDELTKNQVSLTCLVKGFYPSDIAVEWESN |
| | | | | GQPENNYKTTPPVLDSDGSFFLYSKLIVDKSRWQQGNVFSCSVMHEALHNHYTQ |
| | | | | KSLSLSPGK |
| 369 | STIM001-full heavy | | Nucleic acid sequence of | CAGGTTCAGGTGGTGCAGTCTGGAGCTGAGGTGAAGAAGCCTGGGGCCTCAGT |
| | chain sequence | | STIM001 heavy chain | GAAGGTCTCCTGCAAGGCTTCTGGTTACACCTTTTCCACCTTTGGTATCACCTGG |
| | | | | GTGCGACAGGCCCCTGGACAAGGGCTTGAATGGATGGGATGGATCAGCGCTTA |
| | | | | CAATGGTGACACAAACTATGCACAGAATCTCCAGGGCAGAGTCATCATGACCAC |
| | | | | AGACACATCCACGAGCACAGCCTACATGGAGCTGAGGAGCCTGAGATCTGACGA |
| | | | | CACGGCCGTTTATTACTGTGCGAGGAGCAGTGGCCACTACTACTACTACGGTAT |
| | | | | GGACGTCTGGGGCCAAGGGACCACGGTCACCGTCTCCTCAGCCAGCACCAAGGG |
| | | | | CCCCTCTGTGTTCCCTCTGGCCCCTTCCAGCAAGTCCACCTCTGGCGGAACAGC |
| | | | | CGCTCTGGGCTGCCTCGTGAAGGACTACTTCCCCGAGCCTGTGACCGTGTCCTG |
| | | | | GAACTCTGGCGCTCTGACCAGCGGAGTGCACACCTTCCCTGCTGTGCTGCAGTC |
| | | | | CTCCGGCCTGTACTCCCTGTCCTCCGTCGTGACCGTGCCTTCCAGCTCTCTGGG |
| | | | | CACCCAGACCTACATCTGCAACGTGAACCACAAGCCCTCCAACACCAAGGTGGAC |
| | | | | AAGAAGGTGGAACCCAAGTCCTGCGACAAGACCCACACCTGTCCCCCTTGTCCT |
| | | | | GCCCCTGAACTGCTGGGCGGACCTTCCGTGTTCCTGTTCCCCCCAAAGCCCAAG |
| | | | | GACACCCTGATGATCTCCCGGACCCCCGAAGTGACCTGCGTGGTGGTGGATGTG |
| | | | | TCCCACGAGGACCCTGAAGTGAAGTTCAATTGGTACGTGGACGGCGTGGAAGTG |
| | | | | CACAACGCCAAGACCAAGCCTAGAGAGGAACAGTACAACTCCACCTACCGGGTG |
| | | | | GTGTCCGTGCTGACCGTGCTGCACCAGGATTGGCTGAACGGCAAAGAGTACAAG |
| | | | | TGCAAGGTGTCCAACAAGGCCCTGCCTGCCCCCATCGAAAAGACCATCTCCAAG |
| | | | | GCCAAGGGCCAGCCCCGGGAACCCCAGGTGTACACACTGCCCCCTAGCAGGGAC |
| | | | | GAGCTGACCAAGAACCAGGTGTCCCTGACCTGTCTCGTGAAAGGCTTTTACCCC |
| | | | | TCCGATATCGCCGTGGAATGGGAGTCCAACGGCCAGCCTGAGAACAACTACAAG |
| | | | | ACCACCCCCCCTGTGCTGGACTCCGACGGCTCATTCTTCCTGTACAGCAAGCTG |
| | | | | ACAGTGGACAAGTCCCGGTGGCAGCAGGGCAACGTGTTCTCCTGCTCCGTGATG |
| | | | | CACGAGGCCCTGCACAACCACTACACCCAGAAGTCCCTGTCCCTGAGCCCCGGC |
| | | | | AAGTGATGA |
| 370 | STIM001-CDRL1 | | Amino acid sequence of CDRL1 | QSLLHSNEYNY |
| | | | of STIM001 using IMGT | |
| 371 | STIM001-CDRL2 | | Amino acid sequence of CDRL2 | LGS |
| | | | of STIM001 using IMGT | |
| 372 | STIM001-CDRL3 | | Amino acid sequence of CDRL3 | MQSLQTPLT |
| | | | of STIM001 using IMGT | |
| 373 | STIM001-Light chain | | Amino acid sequence of V_{L} of | DIVMTQSPLSLPVTPGEPASISCRSSQSLLHSNEYNYLDWYLQKPGQSPQLLIFLGS |
| | variable region | | STIM001 | NRASGVPDRFSGSGSGTDFTLKITRVEAEDVGIYYCMQSLQTPLTFGGGTINEIK |
| 374 | STIM001-Light chain | | Nucleic acid sequence of V_{L} of | GATATTGTGATGACTCAGTCTCCACTCTCCCTGCCCGTCACCCCTGGAGAGCCG |
| | variable region | | STIM001 | GCCTCCATCTCCTGCAGGTCTAGTCAGAGCCTCCTGCATAGTAATGAATACAACT |
| | | | | ATTTGGATTGGTACCTGCAGAAGCCAGGGCAGTCTCCACAGCTCCTGATCTTTT |
| | | | | TGGGTTCTAATCGGGCCTCCGGGGTCCCTGACAGGTTCAGTGGCAGTGGATCA |
| | | | | GGCACAGATTTTACACTGAAAATCACCAGAGTGGAGGCTGAGGATGTTGGAATT |
| | | | | TATTACTGCATGCAATCTCTACAAACTCCGCTCACTTTCGGCGGAGGGACCAAG |
| | | | | GTGGAGATCAAA |
| 375 | STIM001-full light | | Amino acid sequence of STIM001 | DIVMTQSPLSLPVTPGEPASISCRSSQSLLHSNEYNYLDWYLQKPGQSPQLLIFLGS |
| | chain sequence | | light chain | NRASGVPDRFSGSGSGTDFTLKITRVEAEDVGIYYCMQSLQTPLTFGGGTKVEIK |
| | | | | RIVAAPSVFIFPPSDEQLKSGTASVVCLLNNFYPREAINQWWDNALQSGNSQESV |
| | | | | TEQDSKDSTYSLSSTLTLSKADYEKHKVYACEVTHQGLSSPVTKSFNRGEC |
| 376 | STIM001-full light | | Nucleic acid sequence of | GATATTGTGATGACTCAGTCTCCACTCTCCCTGCCCGTCACCCCTGGAGAGCCG |
| | chain sequence | | STIM001 light chain | GCCTCCATCTCCTGCAGGTCTAGICAGAGCCTCCTGCATAGTAATGAATACAACT |
| | | | | ATTTGGATTGGTACCTGCAGAAGCCAGGGCAGTCTCCACAGCTCCTGATCTTTT |
| | | | | TGGGTTCTAATCGGGCCTCCGGGGTCCCTGACAGGTTCAGTGGCAGTGGATCA |
| | | | | GGCACAGATTTTACACTGAAAATCACCAGAGTGGAGGCTGAGGATGTTGGAATT |
| | | | | TATTACTGCATGCAATCTCTACAAACTCCGCTCACTTTCGGCGGAGGGACCAAG |
| | | | | GTGGAGATCAAAcgtacggtggccgctccctccgtgttcatcttcccaccttccgacgagcagctgaa |
| | | | | gtccggcaccgcttctgtcgtgtgcctgctgaacaacttctacccccgcgaggccaaggtgcagtggaag |
| | | | | gtggacaacgccctgcagtccggcaactcccaggaatccgtgaccgagcaggactccaaggacagcac |
| | | | | ctactccctgtcctccaccctgaccctgtccaaggccgactacgagaagcacaaggtgtacgcctgcgaa |
| | | | | gtgacccaccagggcctgtctagccccgtgaccaagtctttcaaccggggcgagtgt |
| 377 | STIM002-CDRH1 | | Amino acid sequence of CDRH1 | GYTFTSYG |
| | | | of STIM002 using IMGT | |
| 378 | STIM002-CDRH2 | | Amino acid sequence of CDRH2 | ISAYNGNT |
| | | | of STIM002 using IMGT | |
| 379 | STIM002-CDRH3 | | Amino acid sequence of CDRH3 | ARSTYFYGSGTLYGMDV |
| | | | of STIM002 using IMGT | |
| 380 | STIM002-Heavy | | Amino acid sequence of V_{H} of | QVQLVQSGGEVKKPGASVKVSCKASGYTFTSYGFSWVRQAPGQGLEWMGWISAY |
| | chain variable region | | STIM002 | NGNTNYAQKLQGRVTMTTDTSTSTAYMELRSLRSDDTAVYYCARSTYFYGSGTLY |
| | | | | GMDVWGQGTTATTVSS |
| 381 | STIM002-Heavy | | Nucleic acid sequence of V_{H} of | CAGGTTCAACTGGTGCAGTCTGGAGGTGAGGTGAAGAAGCCTGGGGCCTCAGT |
| | chain variable region | | STIM002 | GAAGGTCTCCTGCAAGGCTTCTGGTTACACCTTTACCAGCTATGGTTTCAGCTG |
| | | | | GGTGCGACAGGCCCCTGGACAAGGACTAGAGTGGATGGGATGGATCAGCGCTT |
| | | | | ACAATGGTAACACAAACTATGCACAGAAGCTCCAGGGCAGAGTCACCATGACCA |
| | | | | CAGACACATCCACGAGCACAGCCTACATGGAGCTGAGGAGCTTGAGATCTGACG |
| | | | | ACACGGCCGTGTATTACTGTGCGAGATCTACGTATTTCTATGGTTCGGGGACCC |
| | | | | TCTACGGTATGGACGTCTGGGGCCAAGGGACCACGGTCACCGTCTCCTCA |
| 382 | STIM002-full heavy | | Amino acid sequence of STIM002 | QVQLVQSGGEVKKPGASVKVSCKASGYTFTSYGFSWVRQAPGQGLEWMGWISAY |
| | chain sequence | | heavy chain | NGNTNYAQKLQGRVTMTTDTSTSTAYMELRSLRSDDTAVYYCARSTYFYGSGTLY |
| | | | | GMDVWGQGTTVTVSSASTKGPSVFPLAPSSKSTSGGTAALGCLVKDYFPEPVTVS |
| | | | | WNSGALTSGVHTFPAVLQSSGLYSLSSVVTVPSSSLGTQTYICNVNHKPSNTKVDK |
| | | | | KVEPKSCDKTHTCPPCPAPELLGGPSVFLFPPKPKDTLMISRTPEVTCCVDVSHED |
| | | | | PEVKFNWYVDGVEVHNAKTKPREEQYNSTYRVVSVLTVLHQDWLNGKEYKCKVS |
| | | | | NKALPAPIEKTISKAKGQPREPQVYTLPPSRDELTKNQVSLTCLVKGFYPSDIAVEW |
| | | | | ESNGQPENNYKTTPPVLDSDGSFFLYSKLTVDKSRWQQGNVFSCSVMHEALHNHY |
| | | | | TQKSLSLSPGK |
| 383 | STIM002-full heavy | | Nucleic acid sequence of | CAGGTTCAACTGGTGCAGTCTGGAGGTGAGGTGAAGAAGCCTGGGGCCTCAGT |
| | chain sequence | | STIM002 heavy chain | GAAGGTCTCCTGCAAGGCTTCTGGTTACACCTTTACCAGCTATGGTTTCAGCTG |
| | | | | GGTGCGACAGGCCCCTGGACAAGGACTAGAGTGGATGGGATGGATCAGCGCTT |
| | | | | ACAATGGTAACACAAACTATGCACAGAAGCTCCAGGGCAGAGTCACCATGACCA |
| | | | | CAGACACATCCACGAGCACAGCCTACATGGAGCTGAGGAGCTTGAGATCTGACG |
| | | | | ACACGGCCGTGTATTACTGTGCGAGATCTACGTATTTCTATGGTTCGGGGACCC |
| | | | | TCTACGGTATGGACGTCTGGGGCCAAGGGACCACGGTCACCGTCTCCTCA |
| | | | | GCCAGCACCAAGGGCCCCTCTGTGTTCCCTCTGGCCCCTTCCAGCAAGTCCACC |
| | | | | TCTGGCGGAACAGCCGCTCTGGGCTGCCTCGTGAAGGACTACTTCCCCGAGCCT |
| | | | | GTGACCGTGTCCTGGAACTCTGGCGCTCTGACCAGCGGAGTGCACACCTTCCCT |
| | | | | GCTGTGCTGCAGTCCTCCGGCCTGTACTCCCTGTCCTCCGTCGTGACCGTGCCT |
| | | | | TCCAGCTCTCTGGGCACCCAGACCTACATCTGCAACGTGAACCACAAGCCCTCCA |
| | | | | ACACCAAGGTGGACAAGAAGGTGGAACCCAAGTCCTGCGACAAGACCCACACCT |
| | | | | GTCCCCCTTGTCCTGCCCCTGAACTGCTGGGCGGACCTTCCGTGTTCCTGTTCC |
| | | | | CCCCAAAGCCCAAGGACACCCTGATGATCTCCCGGACCCCCGAAGTGACCTGCG |
| | | | | TGGTGGTGGATGTGTCCCACGAGGACCCTGAAGTGAAGTTCAATTGGTACGTGG |
| | | | | ACGGCGTGGAAGTGCACAACGCCAAGACCAAGCCTAGAGAGGAACAGTACAACT |
| | | | | CCACCTACCGGGTGGTGTCCGTGCTGACCGTGCTGCACCAGGATTGGCTGAACG |
| | | | | GCAAAGAGTACAAGTGCAAGGTGTCCAACAAGGCCCTGCCTGCCCCCATCGAAA |
| | | | | AGACCATCTCCAAGGCCAAGGGCCAGCCCCGGGAACCCCAGGTGTACACACTGC |
| | | | | CCCCTAGCAGGGACGAGCTGACCAAGAACCAGGTGTCCCTGACCTGTCTCGTGA |
| | | | | AAGGCTTCTACCCCTCCGATATCGCCGTGGAATGGGAGTCCAACGGCCAGCCTG |
| | | | | AGAACAACTACAAGACCACCCCCCCTGTGCTGGACTCCGACGGCTCATTCTTCCT |
| | | | | GTACAGCAAGCTGACAGTGGACAAGTCCCGGTGGCAGCAGGGCAACGTGTTCTC |
| | | | | CTGCTCCGTGATGCACGAGGCCCTGCACAACCACTACACCCAGAAGTCCCTGTC |
| | | | | CCTGAGCCCCGGCAAGTGATGA |
| 384 | STIM002-CDRL1 | | Amino acid sequence of CDRL1 | QSLLHSDGYNY |
| | | | of STIM002 using IMGT | |
| 385 | STIM002-CDRL2 | | Amino acid sequence of CDRL2 | LGS |
| | | | of STIM002 using IMGT | |
| 386 | STIM002-CDRL3 | | Amino acid sequence of CDRL3 | MQALQTPLS |
| | | | of STIM002 using IMGT | |
| 387 | STIM002-Light chain | | Amino acid sequence of V_{L} of | DIVMTQSPLSLPVTPGEPASISCRSSQSLLHSDGYNYLDWYLQKPGQSPQLLIYLGS |
| | variable region | | STIM002 | TRASGFPDRFSGSGSGTDFTLKISRVEAEDVGVYYCMQALQTPLSFGQGTKLEIK |
| 388 | STIM002-Light chain | | Nucleic acid sequence of V_{L} of | GATATTGTGATGACTCAGTCTCCACTCTCCCTGCCCGTCACCCCTGGAGAGCCG |
| | variable region | | STIM002 | GCCTCCATCTCCTGCAGGTCTAGTCAGAGCCTCCTGCATAGTGATGGATACAAC |
| | | | | TGTTTGGATTGGTACCTGCAGAAGCCAGGGCAGTCTCCACAGCTCCTGATCTAT |
| | | | | TTGGGTTCTACTCGGGCCTCCGGGTTCCCTGACAGGTTCAGTGGCAGTGGATCA |
| | | | | GGCACAGATTTTACACTGAAAATCAGCAGAGTGGAGGCTGAGGATGTTGGGGTT |
| | | | | TATTACTGCATGCAAGCTCTACAAACTCCGTGCAGTTTTGGCCAGGGGACCAAG |
| | | | | CTGGAGATCAAA |
| 389 | STIM002-full light | | Amino acid sequence of STIM002 | DIVMTQSPLSLPVTPGEPASISCRSSQSLLHSDGYNYLDWYLQKPGQSPQLLIYLGS |
| | chain sequence | | light chain | TRASGFPDRFSGSGSGTDFTLKISRVEAEDVGVYYCMQALQTPLSFGQGTKLEIK |
| | | | | RTVAAPSVFIFPPSDEQLKSGTASVVCLLNNFYPREAKVQWKVDNALQSGNSQESV |
| | | | | TEQDSKDSTYSLSSTLTLSKADYEKHKVYACEVTHQGLSSPVTKSFNRGEC |
| 390 | STIM002-full light | | Nucleic acid sequence of | GATATTGTGATGACTCAGTCTCCACTCTCCCTGCCCGTCACCCCTGGAGAGCCG |
| | chain sequence | | STIM002 light chain | GCCTCCATCTCCTGCAGGTCTAGTCAGAGCCTCCTGCATAGTGATGGATACAAC |
| | | | | TGTTTGGATTGGTACCTGCAGAAGCCAGGGCAGTCTCCACAGCTCCTGATCTAT |
| | | | | TTGGGTTCTACTCGGGCCTCCGGGTTCCCTGACAGGTTCAGTGGCAGTGGATCA |
| | | | | GGCACAGATTTTACACTGAAAATCAGCAGAGTGGAGGCTGAGGATGTTGGGGTT |
| | | | | TATTACTGCATGCAAGCTCTACAAACTCCGTGCAGTTTTGGCCAGGGGACCAAG |
| | | | | CTGGAGATCAAAcgtacggtggccgctccctccgtgttcatcttcccaccttccgacgagcagctgaa |
| | | | | gtccggcaccgcttctgtcgtgtgcctgctgaacaacttctacccccgcgaggccaaggtgcagtggaag |
| | | | | gtggacaacgccctgcagtccggcaactcccaggaatccgtgaccgagcaggactccaaggacagcac |
| | | | | ctactccctgtcctccaccctgaccctgtccaaggccgactacgagaagcacaaggtgtacgcctgcgaa |
| | | | | gtgacccaccagggcctgtctagccccgtgaccaagtctttcaaccggggcgagtgt |
| 391 | STIM002-B-CDRH1 | | Amino acid sequence of CDRH1 | GYTFTSYG |
| | | | of STIM002-B using IMGT | |
| 392 | STIM002-B-CDRH2 | | Amino acid sequence of CDRH2 | ISAYNGNT |
| | | | of STIM002-B using IMGT | |
| 393 | STIM002-B-CDRH3 | | Amino acid sequence of CDRH3 | ARSTYFYGSGTLYGMDV |
| | | | of STIM002-B using IMGT | |
| 394 | STIM002-B-Heavy | | Amino acid sequence of V_{H} of | QVQLVQSGGEVKKPGASVKVSCKASGYTFTSYGFSWVRQAPGQGLEWMGWISAY |
| | chain variable region | | STIM002-B | NGNTNYAQKLQGRVTMTTDTSTSTAYMELRSLRSDDTAVYYCARSTYFYGSGTLY |
| | | | | GMDVWGQGTTVTVSS |
| 395 | STIM002-B-Heavy | | Nucleic acid sequence of V_{H} of | CAGGTTCAACTGGTGCAGTCTGGAGGTGAGGTGAAGAAGCCTGGGGCCTCAGT |
| | chain variable region | | STIM002-B | GAAGGTCTCCTGCAAGGCTTCTGGTTACACCTTTACCAGCTATGGTTTCAGCTG |
| | | | | GGTGCGACAGGCCCCTGGACAAGGACTAGAGTGGATGGGATGGATCAGCGCTT |
| | | | | ACAATGGTAACACAAACTATGCACAGAAGCTCCAGGGCAGAGTCACCATGACCA |
| | | | | CAGACACATCCACGAGCACAGCCTACATGGAGCTGAGGAGCTTGAGATCTGACG |
| | | | | ACACGGCCGTGTATTACTGTGCGAGATCTACGTATTTCTATGGTTCGGGGACCC |
| | | | | TCTACGGTATGGACGTCTGGGGCCAAGGGACCACGGTCACCGTCTCCTCA |
| 396 | STIM002-B-full heavy | | Amino acid sequence of | QVQLVQSGGEVKKPGASVKVSCKASGYTFTSYGFSWVRQAPGQGLEWMGWISAY |
| | chain sequence | | STIM002-B heavy chain | NGNTNYAQKLQGRVTMTTDTSTSTAYMELRSLRSDDTAVYYCARSTYFYGSGTLY |
| | | | | GMDVWGQGTTVTVSSASTKGPSVFPLAPSSKSTSGGTAALGCLVKDYFPEPVTVS |
| | | | | WNSGALTSGVHTFPAVLQSSGLYSLSSVVTVPSSSLGTQTYICNVNHKPSNTKVDK |
| | | | | KVEPKSCDKTHTCPPCPAPELLGGPSVFLFPPKPKDILMISRTPEVTCVVVDVSHED |
| | | | | PEVKFNWYVDGVEVHNAKTKPREEQYNSTYRWSVLTVLHQDWLNGKEYKCKVS |
| | | | | NKALPAPIEKTISKAKGQPREPQVYTLPPSRDELTKNQVSLTCLVKGFYPSDIAVEW |
| | | | | ESNGQPENNYKTTPPVLDSDGSFFLYSKLTVDKSRWQQGNVFSCSVMHEALHNHY |
| | | | | TQKSLSLSPGK |
| 397 | STIM002-B-full heavy | | Nucleic acid sequence of | CAGGTTCAACTGGTGCAGTCTGGAGGTGAGGTGAAGAAGCCTGGGGCCTCAGT |
| | chain sequence | | STIM002-B heavy chain | GAAGGTCTCCTGCAAGGCTTCTGGTTACACCTTTACCAGCTATGGTTTCAGCTG |
| | | | | GGTGCGACAGGCCCCTGGACAAGGACTAGAGTGGATGGGATGGATCAGCGCTT |
| | | | | ACAATGGTAACACAAACTATGCACAGAAGCTCCAGGGCAGAGTCACCATGACCA |
| | | | | CAGACACATCCACGAGCACAGCCTACATGGAGCTGAGGAGCTTGAGATCTGACG |
| | | | | ACACGGCCGTGTATTACTGTGCGAGATCTACGTATTTCTATGGTTCGGGGACCC |
| | | | | TCTACGGTATGGACGTCTGGGGCCAAGGGACCACGGTCACCGTCTCCTCAGCCA |
| | | | | GCACCAAGGGCCCCTCTGTGTTCCCTCTGGCCCCTTCCAGCAAGTCCACCTCTG |
| | | | | GCGGAACAGCCGCTCTGGGCTGCCTCGTGAAGGACTACTTCCCCGAGCCTGTGA |
| | | | | CCGTGTCCTGGAACTCTGGCGCTCTGACCAGCGGAGTGCACACCTTCCCTGCTG |
| | | | | TGCTGCAGTCCTCCGGCCTGTACTCCCTGTCCTCCGTCGTGACCGTGCCTTCCA |
| | | | | GCTCTCTGGGCACCCAGACCTACATCTGCAACGTGAACCACAAGCCCTCCAACAC |
| | | | | CAAGGTGGACAAGAAGGTGGAACCCAAGTCCTGCGACAAGACCCACACCTGTCC |
| | | | | CCCTTGTCCTGCCCCTGAACTGCTGGGCGGACCTTCCGTGTTCCTGTTCCCCCC |
| | | | | AAAGCCCAAGGACACCCTGATGATCTCCCGGACCCCCGAAGTGACCTGCGTGGT |
| | | | | GGTGGATGTGTCCCACGAGGACCCTGAAGTGAAGTTCAATTGGTACGTGGACG |
| | | | | GCGTGGAAGTGCACAACGCCAAGACCAAGCCTAGAGAGGAACAGTACAACTCCA |
| | | | | CCTACCGGGTGGTGTCCGTGCTGACCGTGCTGCACCAGGATTGGCTGAACGGCA |
| | | | | AAGAGTACAAGTGCAAGGTGTCCAACAAGGCCCTGCCTGCCCCCATCGAAAAGA |
| | | | | CCATCTCCAAGGCCAAGGGCCAGCCCCGGGAACCCCAGGTGTACACACTGCCCC |
| | | | | CTAGCAGGGACGAGCTGACCAAGAACCAGGTGTCCCTGACCTGTCTCGTGAAAG |
| | | | | GCTTCTACCCCTCCGATATCGCCGTGGAATGGGAGTCCAACGGCCAGCCTGAGA |
| | | | | ACAACTACAAGACCACCCCCCCTGTGCTGGACTCCGACGGCTCATTCTTCCTGTA |
| | | | | CAGCAAGCTGACAGTGGACAAGTCCCGGTGGCAGCAGGGCAACGTGTTCTCCTG |
| | | | | CTCCGTGATGCACGAGGCCCTGCACAACCACTACACCCAGAAGTCCCTGTCCCT |
| | | | | GAGCCCCGGCAAGTGATGA |
| 398 | STIM002-B-CDRL1 | | Amino acid sequence of CDRL1 | QSLLHSDGYNC |
| | | | of STIM002-B using IMGT | |
| 399 | STIM002-B-CDRL2 | | Amino acid sequence of CDRL2 | LGS |
| | | | of STIM002-B using IMGT | |
| 400 | STIM002-B-CDRL3 | | Amino acid sequence of CDRL3 | MQALQTPCS |
| | | | of STIM002-B using IMGT | |
| 401 | STIM002-B-Light | | Amino acid sequence of V_{L} of | DIVMTQSPLSLPVTPGEPASISCRSSQSLLHSDGYNCLDWYLQKPGQSPQLLIYLGS |
| | chain variable region | | STIM002-B | TRASGFPDRFSGSGSGTDFTLKISRVEAEDVGVYYCMQALQTPCSFGQGTKLEIK |
| 402 | STIM002-B-Light | | Nucleic acid sequence of V_{L} of | GATATTGTGATGACTCAGTCTCCACTCTCCCTGCCCGTCACCCCTGGAGAGCCG |
| | chain variable region | | STIM002-B | GCCTCCATCTCCTGCAGGTCTAGTCAGAGCCTCCTGCATAGTGATGGATACAAC |
| | | | | TGTTTGGATTGGTACCTGCAGAAGCCAGGGCAGTCTCCACAGCTCCTGATCTAT |
| | | | | TTGGGTTCTACTCGGGCCTCCGGGTTCCCTGACAGGTTCAGTGGCAGTGGATCA |
| | | | | GGCACAGATTTTACACTGAAAATCAGCAGAGTGGAGGCTGAGGATGTTGGGGTT |
| | | | | TATTACTGCATGCAAGCTCTACAAACTCCGTGCAGTTTTGGCCAGGGGACCAAG |
| | | | | CTGGAGATCAAA |
| 403 | STIM002-B-full light | | Amino acid sequence of | DIVMTQSPLSLPVTPGEPASISCRSSQSLLHSDGYNCLDWYLQKPGQSPQLLIYLGS |
| | chain sequence | | STIM002-B light chain | TRASGFPDRFSGSGSGTDFTLKISRVEAEDVGVYYCMQALQTPCSFGQGTKLEIK |
| | | | | RTVAAPSVFIFPPSDEQLKSGTASVVCLLNNFYPREAKVQWKVDNALQSGNSQESV |
| | | | | TEQDSKDSTYSLSSTLTLSKADYEKHKVYACEVTHQGLSSPVTKSFNRGEC |
| 404 | STIM002-B-full light | | Nucleic acid sequence of | GATATTGTGATGACTCAGTCTCCACTCTCCCTGCCCGTCACCCCTGGAGAGCCG |
| | chain sequence | | STIM002-B light chain | GCCTCCATCTCCTGCAGGTCTAGTCAGAGCCTCCTGCATAGTGATGGATACAAC |
| | | | | TGTTTGGATTGGTACCTGCAGAAGCCAGGGCAGTCTCCACAGCTCCTGATCTAT |
| | | | | TTGGGTTCTACTCGGGCCTCCGGGTTCCCTGACAGGTTCAGTGGCAGTGGATCA |
| | | | | GGCACAGATTTTACACTGAAAATCAGCAGAGTGGAGGCTGAGGATGTTGGGGTT |
| | | | | TATTACTGCATGCAAGCTCTACAAACTCCGTGCAGTTTTGGCCAGGGGACCAAG |
| | | | | CTGGAGATCAAAcgtacggtggccgctccctccgtgttcatcttcccaccttccgacgagcagctgaa |
| | | | | gtccggcaccgcttctgtcgtgtgcctgctgaacaacttctacccccgcgaggccaaggtgcagtggaag |
| | | | | gtggacaacgccctgcagtccggcaactcccaggaatccgtgaccgagcaggactccaaggacagcac |
| | | | | ctactccctgtcctccaccctgaccctgtccaaggccgactacgagaagcacaaggtgtacgcctgcgaa |
| | | | | gtgacccaccagggcctgtctagccccgtgaccaagtctttcaaccggggcgagtgt |
| 405 | STIM003-CDRH1 | | Amino acid sequence of CDRH1 | GVTFDDYG |
| | | | of STIM003 using IMGT | |
| 406 | STIM003-CDRH2 | | Amino acid sequence of CDRH2 | INWNGGDT |
| | | | of STIM003 using IMGT | |
| 407 | STIM003-CDRH3 | | Amino acid sequence of CDRH3 | ARDFYGSGSYYHVPFDY |
| | | | of STIM003 using IMGT | |
| 408 | STIM003-Heavy | | Amino acid sequence of V_{H} of | EVQLVESGGGVVRPGGSLRLSCVASGVTFDDYGMSWVRQAPGKGLEWVSGINWN |
| | chain variable region | | STIM003 | GGDTDYSDSVKGRFTISRDNAKNSLYLQMNSLRAEDTALYYCARDFYGSGSYYHV |
| | | | | PFDYWGQGILVTVSS |
| 409 | STIM003-Heavy | | Nucleic acid sequence of V_{H} of | GAGGTGCAGCTGGTGGAGTCTGGGGGAGGTGTGGTACGGCCTGGGGGGTCCCT |
| | chain variable region | | STIM003 | GAGACTCTCCTGTGTAGCCTCTGGAGTCACCTTTGATGATTATGGCATGAGCTG |
| | | | | GGTCCGCCAAGCTCCAGGGAAGGGGCTGGARTGGGTCTCTGGTATTAATTGGA |
| | | | | ATGGTGGCGACACAGATTATTCAGACTCTGTGAAGGGCCGATTCACCATCTCCA |
| | | | | GAGACAACGCCAAGAACTCCCTGTATCTACAAATGAATAGTCTGAGAGCCGAGG |
| | | | | ACACGGCCTTGTATTACTGTGCGAGGGATTTCTATGGTTCGGGGAGTTATTATC |
| | | | | ACGTTCCTTTTGACTACTGGGGCCAGGGAATCCTGGTCACCGTCTCCTCA |
| 410 | STIM003-full heavy | | Amino acid sequence of STIM003 | EVQLVESGGGVVRPGGSLRLSCVASGVTFDDYGMSVINRQAPGKGLEWVSGINWN |
| | chain sequence | | heavy chain | GGDTDYSDSVKGRFTISRDNAKNSLYLQMNSLRAEDTALYYCARDFYGSGSYYHV |
| | | | | PFDYWGQGILVTVSSASTKGPSVFPLAPSSKSTSGGTAALGCLVKDYFPEPVIVSW |
| | | | | NSGALTSGVHTFPAVLQSSGLYSLSSVVTVPSSSLGTQTYICNVNHKPSNTKVDKK |
| | | | | VEPKSCDKTHTCPPCPAPELLGGPSVFLFPPKPKDTLMISRTPEVTCVVVDVSHEDP |
| | | | | EVKFNWYVDGVEVHNAKTKPREEQYNSTYRVVSVLTVLHQDWLNGKEYKCKVSN |
| | | | | KALPAPIEKTISKAKGQPREPQVYTLPPSRDELTKNQVSLTCLVKGFYPSDIAVEWE |
| | | | | SNGQPENNYKTTPPVLDSDGSFFLYSKLTVDKSRWQQGNVFSCSVMHEALHNHYT |
| | | | | QKSLSLSPGK |
| 411 | STIM003-full heavy | | Nucleic acid sequence of | GAGGTGCAGCTGGTGGAGTCTGGGGGAGGTGTGGTACGGCCTGGGGGGTCCCT |
| | chain sequence | | STIM003 heavy chain | GAGACTCTCCTGTGTAGCCTCTGGAGTCACCTTTGATGATTATGGCATGAGCTG |
| | | | | GGTCCGCCAAGCTCCAGGGAAGGGGCTGGARTGGGTCTCTGGTATTAATTGGA |
| | | | | ATGGTGGCGACACAGATTATTCAGACTCTGTGAAGGGCCGATTCACCATCTCCA |
| | | | | GAGACAACGCCAAGAACTCCCTGTATCTACAAATGAATAGTCTGAGAGCCGAGG |
| | | | | ACACGGCCTTGTATTACTGTGCGAGGGATTTCTATGGTTCGGGGAGTTATTATC |
| | | | | ACGTTCCTTTTGACTACTGGGGCCAGGGAATCCTGGTCACCGTCTCCTCAGCCA |
| | | | | GCACCAAGGGCCCCTCTGTGTTCCCTCTGGCCCCTTCCAGCAAGTCCACCTCTG |
| | | | | GCGGAACAGCCGCTCTGGGCTGCCTCGTGAAGGACTACTTCCCCGAGCCTGTGA |
| | | | | CCGTGTCCTGGAACTCTGGCGCTCTGACCAGCGGAGTGCACACCTTCCCTGCTG |
| | | | | TGCTGCAGTCCTCCGGCCTGTACTCCCTGTCCTCCGTCGTGACCGTGCCTTCCA |
| | | | | GCTCTCTGGGCACCCAGACCTACATCTGCAACGTGAACCACAAGCCCTCCAACAC |
| | | | | CAAGGTGGACAAGAAGGTGGAACCCAAGTCCTGCGACAAGACCCACACCTGTCC |
| | | | | CCCTTGTCCTGCCCCTGAACTGCTGGGCGGACCTTCCGTGTTCCTGTTCCCCCC |
| | | | | AAAGCCCAAGGACACCCTGATGATCTCCCGGACCCCCGAAGTGACCTGCGTGGT |
| | | | | GGTGGATGTGTCCCACGAGGACCCTGAAGTGAAGTTCAATTGGTACGTGGACG |
| | | | | GCGTGGAAGTGCACAACGCCAAGACCAAGCCTAGAGAGGAACAGTACAACTCCA |
| | | | | CCTACCGGGTGGTGTCCGTGCTGACCGTGCTGCACCAGGATTGGCTGAACGGCA |
| | | | | AAGAGTACAAGTGCAAGGTGTCCAACAAGGCCCTGCCTGCCCCCATCGAAAAGA |
| | | | | CCATCTCCAAGGCCAAGGGCCAGCCCCGGGAACCCCAGGTGTACACACTGCCCC |
| | | | | CTAGCAGGGACGAGCTGACCAAGAACCAGGTGTCCCTGACCTGTCTCGTGAAAG |
| | | | | GCTTCTACCCCTCCGATATCGCCGTGGAATGGGAGTCCAACGGCCAGCCTGAGA |
| | | | | ACAACTACAAGACCACCCCCCCTGTGCTGGACTCCGACGGCTCATTCTTCCTGTA |
| | | | | CAGCAAGCTGACAGTGGACAAGTCCCGGTGGCAGCAGGGCAACGTGTTCTCCTG |
| | | | | CTCCGTGATGCACGAGGCCCTGCACAACCACTACACCCAGAAGTCCCTGTCCCT |
| | | | | GAGCCCCGGCAAGTGATGA |
| 412 | STIM003-CDRL1 | | Amino acid sequence of CDRL1 | QSVSRSY |
| | | | of STIM003 using IMGT | |
| 413 | STIM003-CDRL2 | | Amino acid sequence of CDRL2 | GAS |
| | | | of STIM003 using IMGT | |
| 414 | STIM003-CDRL3 | | Amino acid sequence of CDRL3 | HQYDMSPFT |
| | | | of STIM003 using IMGT | |
| 415 | STIM003-Light chain | | Amino acid sequence of V_{L} of | EIVLTQSPGTLSLSPGERATLSCRASQSVSRSYLAWYQQKRGQAPRLLIYGASSRAT |
| | variable region | | STIM003 | GIPDRFSGDGSGTDFTLSISRLEPEDFAVYYCHQYDMSPFTFGPGTKVDIK |
| 416 | STIM003-Light chain | | Nucleic acid sequence of V_{L} of | GAAATTGTGTTGACGCAGTCTCCAGGGACCCTGTCTTTGTCTCCAGGGGAAAGA |
| | variable region | | STIM003 | GCCACCCTCTCCTGCAGGGCCAGTCAGAGTGTTAGCAGAAGCTACTTAGCCTGG |
| | | | | TACCAGCAGAAACGTGGCCAGGCTCCCAGGCTCCTCATCTATGGTGCATCCAGC |
| | | | | AGGGCCACTGGCATCCCAGACAGGTTCAGTGGCGATGGGTCTGGGACAGACTTC |
| | | | | ACTCTCTCCATCAGCAGACTGGAGCCTGAAGATTTTGCAGTGTATTACTGTCACC |
| | | | | AGTATGATATGTCACCATTCACTTTCGGCCCTGGGACCAAAGTGGATATCAAA |
| 417 | STIM003-full light | | Amino acid sequence of STIM003 | EIVLTQSPGTLSLSPGERATLSCRASQSVSRSYLAWYQQKRGQAPRLLIYGASSRAT |
| | chain sequence | | light chain | GIPDRFSGDGSGTDFTLSISRLEPEDFAVYYCHQYDMSPFTFGPGTKVDIKRTVAAP |
| | | | | SVFIFPPSDEQLKSGTASVVCLLNNFYPREAKVQWKVDNALQSGNSQESVTEQDSK |
| | | | | DSTYSLSSTLTLSKADYEKHKVYACEVTHQGLSSPVTKSFNRGEC |
| 418 | STIM003-full light | | Nucleic acid sequence of | GAAATTGTGTTGACGCAGTCTCCAGGGACCCTGICTTTGTCTCCAGGGGAAAGA |
| | chain sequence | | STIM003 light chain | GCCACCCTCTCCTGCAGGGCCAGTCAGAGTGTTAGCAGAAGCTACTTAGCCTGG |
| | | | | TACCAGCAGAAACGTGGCCAGGCTCCCAGGCTCCTCATCTATGGTGCATCCAGC |
| | | | | AGGGCCACTGGCATCCCAGACAGGTTCAGTGGCGATGGGTCTGGGACAGACTTC |
| | | | | ACTCTCTCCATCAGCAGACTGGAGCCTGAAGATTTTGCAGTGTATTACTGTCACC |
| | | | | AGTATGATATGTCACCATTCACTTTCGGCCCTGGGACCAAAGTGGATATCAAAcg |
| | | | | tacggtggccgctccctccgtgttcatcttcccaccttccgacgagcagctgaagtccggcaccgcttctgtc |
| | | | | gtgtgcctgctgaacaacttctacccccgcgaggccaaggtgcagtggaaggtggacaacgccctgcag |
| | | | | tccggcaactcccaggaatccgtgaccgagcaggactccaaggacagcacctactccctgtcctccaccc |
| | | | | tgaccctgtccaaggccgactacgagaagcacaaggtgtacgcctgcgaagtgacccaccagggcctgt |
| | | | | ctagccccgtgaccaagtctttcaaccggggcgagtgt |
| 419 | STIM004-CDRH1 | | Amino acid sequence of CDRH1 | GLTFDDYG |
| | | | of STIM004 using IMGT | |
| 420 | STIM004-CDRH2 | | Amino acid sequence of CDRH2 | INWNGDNT |
| | | | of STIM004 using IMGT | |
| 421 | STIM004-CDRH3 | | Amino acid sequence of CDRH3 | ARDYYGSGSYYNVPFDY |
| | | | of STIM004 using IMGT | |
| 422 | STIM004-Heavy | | Amino acid sequence of V_{H} of | EVQLVESGGGVVRPGGSLRLSCAASGLTFDDYGMSWVRQVPGKGLEWVSGINWN |
| | chain variable region | | STIM004 | GDNTDYADSVKGRFTISRDNAKNSLYLQMNSLRAEDTALYYCARDYYGSGSYYNV |
| | | | | PFDYWGQGTLVTVSS |
| 423 | STIM004-Heavy | | Nucleic acid sequence of V_{H} of | GAGGTGCAGCTGGTGGAGTCTGGGGGAGGTGTGGTACGGCCTGGGGGGTCCCT |
| | chain variable region | | STIM004 | GAGACTCTCCTGTGCAGCCTCTGGACTCACCTTTGATGATTATGGCATGAGCTG |
| | | | | GGTCCGCCAAGTTCCAGGGAAGGGGCTGGAGTGGGTCTCTGGTATTAATTGGA |
| | | | | ATGGTGATAACACAGATTATGCAGACTCTGTGAAGGGCCGATTCACCATCTCCA |
| | | | | GAGACAACGCCAAGAACTCCCTGTATCTGCAAATGAACAGTCTGAGAGCCGAGG |
| | | | | ACACGGCCTTGTATTACTGTGCGAGGGATTACTATGGTTCGGGGAGTTATTATA |
| | | | | ACGTTCCTTTTGACTACTGGGGCCAGGGAACCCTGGTCACCGTCTCCTCA |
| 424 | STIM004-heavy | | Aminoacidsequence of STIM004 | EVQLVESGGGVVRPGGSLRLSCAASGLTFDDYGMSWVRQVPGKGLEWVSGINWN |
| | chain sequence | | heavy chain | GDNTDYADSVKGRFTISRDNAKNSLYLQMNSLRAEDTALYYCARDYYGSGSYYNV |
| | | | | PFDYWGQGTLVTVSSASTKGPSVFPLAPSSKSTSGGTAALGCLVKDYFPEPVTVSW |
| | | | | NSGALTSGVHTFPAVLQSSGLYSLSSVVTVPSSSLGTQTYICNVNHKPSNTKVDKK |
| | | | | VEPKSCDKTHTCPPCPAPELLGGPSVFLFPPKPKDTLMISRTPEVTCVVVDVSHEDP |
| | | | | EVKFNWYVDGVEVHNAKTKPREEQYNSTYRVVSVLTVLHQDWLNGKEYKCKVSN |
| | | | | KALPAPIEKTISKAKGQPREPQVYTLPPSRDELTKNQVSLTCLVKGFYPSDIAVEWE |
| | | | | SNGQPENNYKTTPPVLDSDGSFFLYSKLTVDKSRWQQGNVFSCSVMHEALHNHYT |
| | | | | QKSLSLSPGK |
| 425 | STIM004-full heavy | | Nucleic acid sequence of | GAGGTGCAGCTGGTGGAGTCTGGGGGAGGTGTGGTACGGCCTGGGGGGTCCCT |
| | chain sequence | | STIM004 heavy chain | GAGACTCTCCTGTGCAGCCTCTGGACTCACCTTTGATGATTATGGCATGAGCTG |
| | | | | GGTCCGCCAAGTTCCAGGGAAGGGGCTGGAGTGGGTCTCTGGTATTAATTGGA |
| | | | | ATGGTGATAACACAGATTATGCAGACTCTGTGAAGGGCCGATTCACCATCTCCA |
| | | | | GAGACAACGCCAAGAACTCCCTGTATCTGCAAATGAACAGTCTGAGAGCCGAGG |
| | | | | ACACGGCCTTGTATTACTGTGCGAGGGATTACTATGGTTCGGGGAGTTATTATA |
| | | | | ACGTTCCTTTTGACTACTGGGGCCAGGGAACCCTGGTCACCGTCTCCTCAGCCA |
| | | | | GCACCAAGGGCCCCTCTGTGTTCCCTCTGGCCCCTTCCAGCAAGTCCACCTCTG |
| | | | | GCGGAACAGCCGCTCTGGGCTGCCTCGTGAAGGACTACTTCCCCGAGCCTGTGA |
| | | | | CCGTGTCCTGGAACTCTGGCGCTCTGACCAGCGGAGTGCACACCTTCCCTGCTG |
| | | | | TGCTGCAGTCCTCCGGCCTGTACTCCCTGTCCTCCGTCGTGACCGTGCCTTCCA |
| | | | | GCTCTCTGGGCACCCAGACCTACATCTGCAACGTGAACCACAAGCCCTCCAACAC |
| | | | | CAAGGTGGACAAGAAGGTGGAACCCAAGTCCTGCGACAAGACCCACACCTGTCC |
| | | | | CCCTTGTCCTGCCCCTGAACTGCTGGGCGGACCTTCCGTGTTCCTGTTCCCCCC |
| | | | | AAAGCCCAAGGACACCCTGATGATCTCCCGGACCCCCGAAGTGACCTGCGTGGT |
| | | | | GGTGGATGTGTCCCACGAGGACCCTGAAGTGAAGTTCAATTGGTACGTGGACG |
| | | | | GCGTGGAAGTGCACAACGCCAAGACCAAGCCTAGAGAGGAACAGTACAACTCCA |
| | | | | CCTACCGGGTGGTGTCCGTGCTGACCGTGCTGCACCAGGATTGGCTGAACGGCA |
| | | | | AAGAGTACAAGTGCAAGGTGTCCAACAAGGCCCTGCCTGCCCCCATCGAAAAGA |
| | | | | CCATCTCCAAGGCCAAGGGCCAGCCCCGGGAACCCCAGGTGTACACACTGCCCC |
| | | | | CTAGCAGGGACGAGCTGACCAAGAACCAGGTGTCCCTGACCTGTCTCGTGAAAG |
| | | | | GCTTCTACCCCTCCGATATCGCCGTGGAATGGGAGTCCAACGGCCAGCCTGAGA |
| | | | | ACAACTACAAGACCACCCCCCCTGTGCTGGACTCCGACGGCTCATTCTTCCTGTA |
| | | | | CAGCAAGCTGACAGTGGACAAGTCCCGGTGGCAGCAGGGCAACGTGTTCTCCTG |
| | | | | CTCCGTGATGCACGAGGCCCTGCACAACCACTACACCCAGAAGTCCCTGTCCCT |
| | | | | GAGCCCCGGCAAGTGATGA |
| 426 | S1IM004-CDRL1 | | Amino acid sequence of CDRL1 | QSVSSSY |
| | | | of STIM004 using IMGT | |
| 427 | STIM004-CDRL2 | | Amino acid sequence of CDRL2 | GAS |
| | | | of STIM004 using IMGT | |
| 428 | STIM004-CDRL3 | | Amino acid sequence of CDRL3 | QQYGSSPF |
| | | | of STIM004 using IMGT | |
| 429 | STIM004-Corrected | | Amino acid sequence of | EIVLTQSPGTLSLSPGERATLSCRASQSVSSSYLAWYQQKPGQAPRLLIYGASSRAT |
| | light chain variable | | corrected VL of STIM004 | GIPDRFSGSGSGTDFTLTIRRLEPEDFAVYYCQQYGSSPFFGPGTKVDIK |
| | region | | | |
| 430 | STIM004-Corrected | | Nucleic acid sequence of | GAAATTGTGTTGACGCAGTCTCCAGGCACCCTGTCTTTGTCTCCAGGGGAAAGA |
| | light chain variable | | corrected VL of STIM004 | GCCACCCTCTCCTGCAGGGCCAGTCAGAGTGTTAGCAGCAGCTACTTAGCCTGG |
| | region | | | TACCAGCAGAAACCTGGCCAGGCTCCCAGGCTCCTCATATATGGTGCATCCAGC |
| | | | | AGGGCCACTGGCATCCCAGACAGGTTCAGTGGCAGTGGGTCTGGGACAGACTTC |
| | | | | ACTCTCACCATCAGAAGACTGGAGCCTGAAGATTTTGCAGTGTATTACTGTCAG |
| | | | | CAGTATGGTAGTTCACCATTCTTCGGCCCTGGGACCAAAGTGGATATCAAA |
| 431 | STIM004-Light chain | | Nucleic acid sequence of V_{L} of | GAAATTGTGTTGACGCAGTCTCCAGGCACCCTGTCTTTGTCTCCAGGGGAAAGA |
| | variable region | | STIM004 | GCCACCCTCTCCTGCAGGGCCAGTCAGAGTGTTAGCAGCAGCTACTTAGCCTGG |
| | | | | TACCAGCAGAAACCTGGCCAGGCTCCCAGGCTCCTCATATATGGTGCATCCAGC |
| | | | | AGGGCCACTGGCATCCCAGACAGGTTCAGTGGCAGTGGGTCTGGGACAGACTTC |
| | | | | ACTCTCACCATCAGAAGACTGGAGCCTGAAGATTTTGCAGTGTATTACTGTCAG |
| | | | | CAGTATGGTAGTTCACCATTCACTTCGGCCCTGGGACCAAAGTGGATATCAAA |
| 432 | STIM004-full | | Amino acid sequence of STIM004 | EIVLTQSPGTLSLSPGERATLSCRASQSVSSSYLAWYQQKPGQAPRLLIYGASSRAT |
| | corrected light chain | | light chain | GIPDRFSGSGSGTDFTLTIRRLEPEDFAVYYCQQYGSSPFFGPGTKVDIKRTVAAPS |
| | sequence | | | VFIFPPSDEQLKSGTASVVCLLNNFYPREAKVQWKVDNALQSGNSQESVTEQDSK |
| | | | | DSTYSLSSTLTLSKADYEKHKVYACEVTHQGLSSPVTKSFNRGEC |
| 433 | STIM004-full | | Nucleic acid sequence of | GAAATTGTGTTGACGCAGTCTCCAGGCACCCTGTCTTTGTCTCCAGGGGAAAGA |
| | corrected light chain | | corrected STIM004 light chain | GCCACCCTCTCCTGCAGGGCCAGTCAGAGTGTTAGCAGCAGCTACTTAGCCTGG |
| | sequence | | | TACCAGCAGAAACCTGGCCAGGCTCCCAGGCTCCTCATATATGGTGCATCCAGC |
| | | | | AGGGCCACTGGCATCCCAGACAGGTTCAGTGGCAGTGGGTCTGGGACAGACTTC |
| | | | | ACTCTCACCATCAGAAGACTGGAGCCTGAAGATTTTGCAGTGTATTACTGTCAG |
| | | | | CAGTATGGTAGTTCACCATTCTTCGGCCCTGGGACCAAAGTGGATATCAAAcgta |
| | | | | cggtggccgctccctccgtgttcatcttcccaccttccgacgagcagctgaagtccggcaccgcttctgtcg |
| | | | | tgtgcctgctgaacaacttctacccccgcgaggccaaggtgcagtggaaggtggacaacgccctgcagt |
| | | | | ccggcaactcccaggaatccgtgaccgagcaggactccaaggacagcacctactccctgtcctccaccct |
| | | | | gaccctgtccaaggccgactacgagaagcacaaggtgtacgcctgcgaagtgacccaccagggcctgt |
| | | | | ctagccccgtgaccaagtctttcaaccggggcqagtgt |
| 434 | STIM004-full light | | Nucleic acid sequence of | GAAATTGTGTTGACGCAGTCTCCAGGCACCCTGTCTTTGTCTCCAGGGGAAAGA |
| | chain sequence | | STIM004 light chain | GCCACCCTCTCCTGCAGGGCCAGTCAGAGTGTTAGCAGCAGCTACTTAGCCTGG |
| | | | | TACCAGCAGAAACCTGGCCAGGCTCCCAGGCTCCTCATATATGGTGCATCCAGC |
| | | | | AGGGCCACTGGCATCCCAGACAGGTTCAGTGGCAGTGGGTCTGGGACAGACTTC |
| | | | | ACTCTCACCATCAGAAGACTGGAGCCTGAAGATTTTGCAGTGTATTACTGTCAG |
| | | | | CAGTATGGTAGTTCACCATTCACTTCGGCCCTGGGACCAAAGTGGATATCAAAcg |
| | | | | tacggtggccgctccctccgtgttcatcttcccaccttccgacgagcagctgaagtccggcaccgcttctgtc |
| | | | | gtgtgcctgctgaacaacttctacccccgcgaggccaaggtgcagtggaaggtggacaacgccctgcag |
| | | | | tccggcaactcccaggaatccgtgaccgagcaggactccaaggacagcacctactccctgtcctccaccc |
| | | | | tgaccctgtccaaggccgactacgagaagcacaaggtgtacgcctgcgaagtgacccaccagggcctgt |
| | | | | ctagccccgtgaccaagtctttcaaccggggcgagtgt |
| 435 | STIM005-CDRH1 | | Amino acid sequence of CDRH1 | GYTFNSYG |
| | | | of STIM005 using IMGT | |
| 436 | STIM005-CDRH2 | | Amino acid sequence of CDRH2 | ISVHNGNT |
| | | | of STIM005 using IMGT | |
| 437 | STIM005-CDRH3 | | Amino acid sequence of CDRH3 | ARAGYDILTDFSDAFDI |
| | | | of STIM005 using IMGT | |
| 438 | STIM005-Heavy | | Amino acid sequence of V_{H} of | QVQLVQSGAEVKKPGASVKVSCKASGYTFNSYGIIWVRQAPGQGLEWMGWISVH |
| | chain variable region | | STIM005 | NGNTNCAQKLQGRVTMTTDTSTSTAYMELRSCRTDDTAVYYCARAGYDILTDFSD |
| | | | | AFDIWGHGTMVTVSS |
| 439 | STIM005-Heavy | | Nucleic acid sequence of V_{H} of | CAGGTTCAGTTGGTGCAGTCTGGAGCTGAGGTGAAGAAGCCTGGGGCCTCAGT |
| | chain variable region | | STIM005 | GAAGGTCTCCTGCAAGGCTTCTGGTTACACCTTTAATAGTTATGGTATCATCTG |
| | | | | GGTGCGACAGGCCCCTGGACAAGGGCTTGAGTGGATGGGATGGATCAGCGTTC |
| | | | | ACAATGGTAACACAAACTGTGCACAGAAGCTCCAGGGTAGAGTCACCATGACCA |
| | | | | CAGACACATCCACGAGCACAGCCTACATGGAGCTGAGGAGCCTGAGAACTGACG |
| | | | | ACACGGCCGTGTATTACTGTGCGAGAGCGGGTTACGATATTTTGACTGATTTTT |
| | | | | CCGATGCTTTTGATATCTGGGGCCACGGGACAATGGTCACCGTCTCTTCA |
| 440 | STIM005-full heavy | | Amino acid sequence of STIM005 | QVQLVQSGAEVKKPGASVKVSCKASGYTFNSYGIIWVRQAPGQGLEWMGWISVH |
| | chain sequence | | heavy chain | NGNTNCAQKLQGRVTMTTDTSTSTAYMELRSLRTDDTAVYYCARAGYDILTDFSD |
| | | | | AFDIWGHGTMVTVSSASTKGPSVFPIAPSSKSTSGGTAALGCLVKDYFPEPVTVSW |
| | | | | NSGALTSGVHTFPAVLQSSGLYSLSSVVTVPSSSLGTQTYICNVNHKPSNTKVDKK |
| | | | | VEPKSCDKTHTCPPCPAPELLGGPSVFLFPPKPKDTLMISRTPEVTCVVVDVSHEDP |
| | | | | EVKFNWYVDGVEVHNAKTKPREEQYNSTYRVVSVLTVLHQDWLNGKEYKCKVSN |
| | | | | KALPAPIEKTISKAKGQPREPQVYTLPPSRDELTKNQVSLTCLVKGFYPSDIAVEWE |
| | | | | SNGQPENNYKTTPPVLDSDGSFFLYSKLTVDKSRWQQGNVFSCSVMHEALHNHYT |
| | | | | QKSLSLSPGK |
| 441 | STIM005-full heavy | | Nucleic acid sequence of | CAGGTTCAGTTGGTGCAGTCTGGAGCTGAGGTGAAGAAGCCTGGGGCCTCAGT |
| | chain sequence | | STIM005 heavy chain | GAAGGTCTCCTGCAAGGCTTCTGGTTACACCTTTAATAGTTATGGTATCATCTG |
| | | | | GGTGCGACAGGCCCCTGGACAAGGGCTTGAGTGGATGGGATGGATCAGCGTTC |
| | | | | ACAATGGTAACACAAACTGTGCACAGAAGCTCCAGGGTAGAGTCACCATGACCA |
| | | | | CAGACACATCCACGAGCACAGCCTACATGGAGCTGAGGAGCCTGAGAACTGACG |
| | | | | ACACGGCCGTGTATTACTGTGCGAGAGCGGGTTACGATATTTTGACTGATTTTT |
| | | | | CCGATGCTTTTGATATCTGGGGCCACGGGACAATGGTCACCGTCTCTTCA |
| | | | | GCCAGCACCAAGGGCCCCTCTGTGTTCCCTCTGGCCCCTTCCAGCAAGTCCACC |
| | | | | TCTGGCGGAACAGCCGCTCTGGGCTGCCTCGTGAAGGACTACTTCCCCGAGCCT |
| | | | | GTGACCGTGTCCTGGAACTCTGGCGCTCTGACCAGCGGAGTGCACACCTTCCCT |
| | | | | GCTGTGCTGCAGTCCTCCGGCCTGTACTCCCTGTCCTCCGTCGTGACCGTGCCT |
| | | | | TCCAGCTCTCTGGGCACCCAGACCTACATCTGCAACGTGAACCACAAGCCCTCCA |
| | | | | ACACCAAGGTGGACAAGAAGGTGGAACCCAAGTCCTGCGACAAGACCCACACCT |
| | | | | GTCCCCCTTGTCCTGCCCCTGAACTGCTGGGCGGACCTTCCGTGTTCCTGTTCC |
| | | | | CCCCAAAGCCCAAGGACACCCTGATGATCTCCCGGACCCCCGAAGTGACCTGCG |
| | | | | TGGTGGTGGATGTGTCCCACGAGGACCCTGAAGTGAAGTTCAATTGGTACGTGG |
| | | | | ACGGCGTGGAAGTGCACAACGCCAAGACCAAGCCTAGAGAGGAACAGTACAACT |
| | | | | CCACCTACCGGGTGGTGTCCGTGCTGACCGTGCTGCACCAGGATTGGCTGAACG |
| | | | | GCAAAGAGTACAAGTGCAAGGTGTCCAACAAGGCCCTGCCTGCCCCCATCGAAA |
| | | | | AGACCATCTCCAAGGCCAAGGGCCAGCCCCGGGAACCCCAGGTGTACACACTGC |
| | | | | CCCCTAGCAGGGACGAGCTGACCAAGAACCAGGTGTCCCTGACCTGTCTCGTGA |
| | | | | AAGGCTTCTACCCCTCCGATATCGCCGTGGAATGGGAGTCCAACGGCCAGCCTG |
| | | | | AGAACAACTACAAGACCACCCCCCCTGTGCTGGACTCCGACGGCTCATTCTTCCT |
| | | | | GTACAGCAAGCTGACAGTGGACAAGTCCCGGTGGCAGCAGGGCAACGTGTTCTC |
| | | | | CTGCTCCGTGATGCACGAGGCCCTGCACAACCACTACACCCAGAAGTCCCTGTC |
| | | | | CCTGAGCCCCGGCAAGTGATGA |
| 442 | STIM005-CDRL1 | | Amino acid sequence of CDRL1 | QNINNF |
| | | | of STIM005 using IMGT | |
| 443 | STIM005-CDRL2 | | Amino acid sequence of CDRL2 | AAS |
| | | | of STIM005 using IMGT | |
| 444 | STIM005-CDRL3 | | Amino acid sequence of CDRL3 | QQSYGIPW |
| | | | of STIM005 using IMGT | |
| 445 | STIM005-Light chain | | Amino acid sequence of V_{L} of | DIQMTQSPSSLSASVGDRVTITCRASQNINNFLNWYQQKEGKGPKLLIYAASSLQR |
| | variable region | | STIM005 | GIPSTFSGSGSGTDFTLTISSLQPEDFATYICQQSYGIPWVGQGTKVEIK |
| 446 | STIM005-Light chain | | Nucleic acid sequence of V_{L} of | GACATCCAGATGACCCAGTCTCCATCCTCCCTGTCTGCATCTGTAGGAGACAGA |
| | variable region | | STIM005 | GTCACCATCACTTGCCGGGCAAGTCAGAACATTAATAACTTTTTAAATTGGTATC |
| | | | | AGCAGAAAGAAGGGAAAGGCCCTAAGCTCCTGATCTATGCAGCATCCAGTTTGC |
| | | | | AAAGAGGGATACCATCAACGTTCAGTGGCAGTGGATCTGGGACAGACTTCACTC |
| | | | | TCACCATCAGCAGTCTGCAACCTGAAGATTTTGCAACTTACATCTGTCAACAGAG |
| | | | | CTACGGTATCCCGTGGGTCGGCCAAGGGACCAAGGTGGAAATCAAA |
| 447 | STIM005-full light | | Amino acid sequence of STIM005 | DIQMTQSPSSLSASVGDRVTITCRASQNINNFLNWYQQKEGKGPKLLIYAASSLQR |
| | chain sequence | | light chain | GIPSTFSGSGSGTDFILTISSLQPEDFATYICQQSYGIPWVGQGTKVEIK |
| | | | | RTVAAPSVFIFPPSDEQLKSGTASVVCLLNNFYPREAKVQWKVDNALQSGNSQESV |
| | | | | TEQDSKDSTYSLSSTLTLSKADYEKHKVYACEVTHQGLSSPVTKSFNRGEC |
| 448 | STIM005-full light | | Nucleic acid sequence of | GACATCCAGATGACCCAGTCTCCATCCTCCCTGTCTGCATCTGTAGGAGACAGA |
| | chain sequence | | STIM005 light chain | GTCACCATCACTTGCCGGGCAAGICAGAACATTAATAACTTTTTAAATTGGTATC |
| | | | | AGCAGAAAGAAGGGAAAGGCCCTAAGCTCCTGATCTATGCAGCATCCAGTTTGC |
| | | | | AAAGAGGGATACCATCAACGTTCAGTGGCAGTGGATCTGGGACAGACTTCACTC |
| | | | | TCACCATCAGCAGTCTGCAACCTGAAGATTTTGCAACTTACATCTGTCAACAGAG |
| | | | | CTACGGTATCCCGTGGGTCGGCCAAGGGACCAAGGTGGAAATCAAAcgtacggtgg |
| | | | | ccgctccctccgtgttcatcttcccaccttccgacgagcagctgaagtccggcaccgcttctgtcgtgtgcct |
| | | | | gctgaacaacttctacccccgcgaggccaaggtgcagtggaaggtggacaacgccctgcagtccggca |
| | | | | actcccaggaatccgtgaccgagcaggactccaaggacagcacctactccctgtcctccaccctgaccct |
| | | | | gtccaaggccgactacgagaagcacaaggtgtacgcctgcgaagtgacccaccagggcctgtctagcc |
| | | | | ccgtgaccaagtctttcaaccggggcgagtgt |
| 449 | STIM006-CDRH1 | | Amino acid sequence of CDRH1 | GFTFSDYF |
| | | | of STIM006 using IMGT | |
| 450 | STIM006-CDRH2 | | Amino acid sequence of CDRH2 | ISSSGSTI |
| | | | of STIM006 using IMGT | |
| 451 | STIM006-CDRH3 | | Amino acid sequence of CDRH3 | ARDHYDGSGIYPLYYYYGLDV |
| | | | of STIM006 using IMGT | |
| 452 | STIM006-Heavy | | Amino acid sequence of V_{H} of | QVQLVESGGGLVKPGGSLRLSCAASGFTFSDYFMSWIRQAPGKGLEWISYISSSGS |
| | chain variable region | | STIM006 | TIYYADSVRGRFTISRDNAKYSLYLQMNSLRSEDTAVYYCARDHYDGSGIYPLYYYY |
| | | | | GLDVWGQGTTVTVSS |
| 453 | STIM006-Heavy | | Nucleic acid sequence of V_{H} of | CAGGTGCAGCTGGTGGAGTCTGGGGGAGGCTTGGTCAAGCCTGGAGGGTCCCT |
| | chain variable region | | STIM006 | GAGACTCTCCTGTGCAGCCTCTGGATTCACCTTCAGTGACTACTTCATGAGCTG |
| | | | | GATCCGCCAGGCGCCAGGGAAGGGGCTGGAGTGGATTTCATACATTAGTTCTAG |
| | | | | TGGTAGTACCATATACTACGCAGACTCTGTGAGGGGCCGATTCACCATCTCCAG |
| | | | | GGACAACGCCAAGTACTCACTGTATCTGCAAATGAACAGCCTGAGATCCGAGGA |
| | | | | CACGGCCGTGTATTACTGTGCGAGAGATCACTACGATGGTTCGGGGATTTATCC |
| | | | | CCTCTACTACTATTACGGTTTGGACGTCTGGGGCCAGGGGACCACGGTCACCGT |
| | | | | CTCCTCA |
| 454 | STIM006-full heavy | | Amino acid sequence of STIM006 | QVQLVESGGGLVKPGGSLRLSCAASGFTFSDYFMSWIRQAPGKGLEWISYISSSGS |
| | chain sequence | | heavy chain | TIYYADSVRGRFTSRDNAKYSLYLQMNSLRSEDTAVYYCARDHYDGSGIYPLYYYY |
| | | | | GLDVWGQGTTVTVSSASTKGPSVFPLAPSSKSTSGGTAALGCLVKDYFPEPVTVSW |
| | | | | NSGALTSGVHTFPAVLQSSGLYSLSSVVTVPSSSLGTQTYICNVNHKPSNTKVDKK |
| | | | | VEPKSCDKTHTCPPCPAPELLGGPSVFLFPPKPKDTLMISRTPEVTCVVVDVSHEDP |
| | | | | EVKFNWYVDGVEVHNAKTKPREEQYNSTYRVVSVLTVLHQDWLNGKEYKCKVSN |
| | | | | KALPAPIEKTISKAKGQPREPQVYTLPPSRDELTKNQVSLTCLVKGFYPSDIAVEWE |
| | | | | SNGQPENNYKTTPPVLDSDGSFFLYSKLIVDKSRWQQGNVFSCSVMHEALHNHYT |
| | | | | QKSLSLSPGK |
| 455 | STIM006-full heavy | | Nucleic acid sequence of | CAGGTGCAGCTGGTGGAGTCTGGGGGAGGCTTGGTCAAGCCTGGAGGGTCCCT |
| | chain sequence | | STIM006 heavy chain | GAGACTCTCCTGTGCAGCCTCTGGATTCACCTTCAGTGACTACTTCATGAGCTG |
| | | | | GATCCGCCAGGCGCCAGGGAAGGGGCTGGAGTGGATTTCATACATTAGTTCTAG |
| | | | | TGGTAGTACCATATACTACGCAGACTCTGTGAGGGGCCGATTCACCATCTCCAG |
| | | | | GGACAACGCCAAGTACTCACTGTATCTGCAAATGAACAGCCTGAGATCCGAGGA |
| | | | | CACGGCCGTGTATTACTGTGCGAGAGATCACTACGATGGTTCGGGGATTTATCC |
| | | | | CCTCTACTACTATTACGGTTTGGACGTCTGGGGCCAGGGGACCACGGTCACCGT |
| | | | | CTCCTCAGCCAGCACCAAGGGCCCCTCTGTGTTCCCTCTGGCCCCTTCCAGCAA |
| | | | | GTCCACCTCTGGCGGAACAGCCGCTCTGGGCTGCCTCGTGAAGGACTACTTCCC |
| | | | | CGAGCCTGTGACCGTGTCCTGGAACTCTGGCGCTCTGACCAGCGGAGTGCACAC |
| | | | | CTTCCCTGCTGTGCTGCAGTCCTCCGGCCTGTACTCCCTGTCCTCCGTCGTGAC |
| | | | | CGTGCCTTCCAGCTCTCTGGGCACCCAGACCTACATCTGCAACGTGAACCACAA |
| | | | | GCCCTCCAACACCAAGGTGGACAAGAAGGTGGAACCCAAGTCCTGCGACAAGAC |
| | | | | CCACACCTGTCCCCCTTGTCCTGCCCCTGAACTGCTGGGCGGACCTTCCGTGTT |
| | | | | CCTGTTCCCCCCAAAGCCCAAGGACACCCTGATGATCTCCCGGACCCCCGAAGT |
| | | | | GACCTGCGTGGTGGTGGATGTGTCCCACGAGGACCCTGAAGTGAAGTTCAATTG |
| | | | | GTACGTGGACGGCGTGGAAGTGCACAACGCCAAGACCAAGCCTAGAGAGGAAC |
| | | | | AGTACAACTCCACCTACCGGGTGGTGTCCGTGCTGACCGTGCTGCACCAGGATT |
| | | | | GGCTGAACGGCAAAGAGTACAAGTGCAAGGTGTCCAACAAGGCCCTGCCTGCCC |
| | | | | CCATCGAAAAGACCATCTCCAAGGCCAAGGGCCAGCCCCGGGAACCCCAGGTGT |
| | | | | ACACACTGCCCCCTAGCAGGGACGAGCTGACCAAGAACCAGGTGTCCCTGACCT |
| | | | | GTCTCGTGAAAGGCTTCTACCCCTCCGATATCGCCGTGGAATGGGAGTCCAACG |
| | | | | GCCAGCCTGAGAACAACTACAAGACCACCCCCCCTGTGCTGGACTCCGACGGCT |
| | | | | CATTCTTCCTGTACAGCAAGCTGACAGTGGACAAGTCCCGGTGGCAGCAGGGCA |
| | | | | ACGTGTTCTCCTGCTCCGTGATGCACGAGGCCCTGCACAACCACTACACCCAGA |
| | | | | AGTCCCTGTCCCTGAGCCCCGGCAAGTGATGA |
| 456 | STIM006-CDRL1 | | Amino acid sequence of CDRL1 | QSLLHSNGYNY |
| | | | of STIM006 using IMGT | |
| 457 | STIM006-CDRL2 | | Amino acid sequence of CDRL2 | LGS |
| | | | of STIM006 using IMGT | |
| 458 | STIM006-CDRL3 | | Amino acid sequence of CDRL3 | MQALQTPRS |
| | | | of STIM006 using IMGT | |
| 459 | STIM006-Light chain | | Amino acid sequence of V_{L} of | IVMTQSPLSLPVTPGEPASISCRSSQSLLHSNGYNYLDYYLQKPGQSPQLLIYLGSY |
| | variable region | | STIM006 | RASGVPDRFSGSGSGTDFTLKISRVEAEDVGVYYCMQALQTPRSFGQGTTLEIK |
| 460 | STIM006-Light chain | | Nucleic acid sequence of V_{L} of | ATTGTGATGACTCAGTCTCCACTCTCCCTACCCGTCACCCCTGGAGAGCCGGCC |
| | variable region | | STIM006 | TCCATCTCCTGCAGGTCTAGTCAGAGCCTCCTGCATAGTAATGGATACAACTATT |
| | | | | TGGATTATTACCTGCAGAAGCCAGGGCAGTCTCCACAGCTCCTGATCTATTTGG |
| | | | | GTTCTTATCGGGCCTCCGGGGTCCCTGACAGGTTCAGTGGCAGTGGATCAGGCA |
| | | | | CAGATTTTACACTGAAAATCAGCAGAGTGGAGGCTGAGGATGTTGGGGTTTATT |
| | | | | ACTGCATGCAAGCTCTACAAACTCCTCGCAGTTTTGGCCAGGGGACCACGCTGG |
| | | | | AGATCAAA |
| 461 | STIM006-full light | | Amino acid sequence of STIM006 | IVMTQSPLSLPVTPGEPASISCRSSQSLLHSNGYNYLDYYLQKPGQSPQLLIYLGSY |
| | chain sequence | | light chain | RASGVPDRFSGSGSGTDFTLKISRVEAEDVGVYYCMQALQTPRSFGQGTTLEIKRT |
| | | | | VAAPSVFIFPPSDEQLKSGTASVVCLLNNFYPREAKVQWKVDNALQSGNSQESVTE |
| | | | | QDSKDSTYSLSSTLTLSKADYEKHKVYACEVTHQGLSSPVTKSFNRGEC |
| 462 | STIM006-full light | | Nucleic acid sequence of | ATTGTGATGACTCAGTCTCCACTCTCCCTACCCGTCACCCCTGGAGAGCCGGCC |
| | chain sequence | | STIM006 light chain | TCCATCTCCTGCAGGTCTAGTCAGAGCCTCCTGCATAGTAATGGATACAACTATT |
| | | | | TGGATTATTACCTGCAGAAGCCAGGGCAGTCTCCACAGCTCCTGATCTATTTGG |
| | | | | GTTCTTATCGGGCCTCCGGGGTCCCTGACAGGTTCAGTGGCAGTGGATCAGGCA |
| | | | | CAGATTTTACACTGAAAATCAGCAGAGTGGAGGCTGAGGATGTTGGGGTTTATT |
| | | | | ACTGCATGCAAGCTCTACAAACTCCTCGCAGTTTTGGCCAGGGGACCACGCTGG |
| | | | | AGATCAAAcgtacggtggccgctccctccgtgttcatcttcccaccttccgacgagcagctgaagtccg |
| | | | | gcaccgcttctgtcgtgtgcctgctgaacaacttctacccccgcgaggccaaggtgcagtggaaggtgga |
| | | | | caacgccctgcagtccggcaactcccaggaatccgtgaccgagcaggactccaaggacagcacctactc |
| | | | | cctgtcctccaccctgaccctgtccaaggccgactacgagaagcacaaggtgtacgcctgcgaagtgacc |
| | | | | caccagggcctgtctagccccgtgaccaagtctttcaaccggggcgagtgt |
| 463 | STIM007-CDRH1 | | Amino acid sequence of CDRH1 | GFSLSTTGVG |
| | | | of STIM007 using IMGT | |
| 464 | STIM007-CDRH2 | | Amino acid sequence of CDRH2 | IYWDDDK |
| | | | of STIM007 using IMGT | |
| 465 | STIM007-CDRH3 | | Amino acid sequence of CDRH3 | THGYGSASYYHYGMDV |
| | | | of STIM007 using IMGT | |
| 466 | STIM007-Heavy | | Amino acid sequence of V_{H} of | QITLKESGPTLVKPTQTLTLTCTFSGFSLSTTGVGVGWIRQPPGKALEWLAVIYWD |
| | chain variable region | | STIM007 | DDKRYSPSLKSRLTITKDTSKNQVVLTMTNMDPVDTATYFCTHGYGSASYYHYGM |
| | | | | DVWGQGTTVTVSS |
| 467 | STIM007-Heavy | | Nucleic acid sequence of V_{H} of | CAGATCACCTTGAAGGAGTCTGGTCCTACGCTGGTGAAACCCACACAGACCCTC |
| | chain variable region | | STIM007 | ACGCTGACCTGCACCTTCTCTGGGTTCTCACTCAGCACTACTGGAGTGGGTGTG |
| | | | | GGCTGGATCCGTCAGCCCCCAGGAAAGGCCCTGGAGTGGCTTGCAGTCATTTAT |
| | | | | TGGGATGATGATAAGCGCTACAGCCCATCTCTGAAGAGCAGACTCACCATCACC |
| | | | | AAGGACACCTCCAAAAACCAGGTGGTCCTTACAATGACCAACATGGACCCTGTG |
| | | | | GACACAGCCACATATTTCTGTACACACGGATATGGTTCGGCGAGTTATTACCACT |
| | | | | ACGGTATGGACGTCTGGGGCCAAGGGACCACGGTCACCGTCTCCTCA |
| 468 | STIM007-full heavy | | Amino acid sequence of STIM007 | QITLKESGPTLVKPTQTLTLTCTFSGFSLSTTGVGVGWIRQPPGKALEWLAVIYWD |
| | chain sequence | | heavy chain | DDKRYSPSLKSRLTITKDTSKNQVVLTMTNMDPVDTATYFCTHGYGSASYYHYGM |
| | | | | DVWGQGTTVTVSSASTKGPSVFPLAPSSKSTSGGTAALGCLVKDYFPEPVTVSWN |
| | | | | SGALTSGVHTFPAVLQSSGLYSLSSVVTVPSSSLGTQTYICNVNHKPSNTKVDKWE |
| | | | | PKSCDKTHTCPPCPAPELLGGPSVFLFPPKPKDTLMISRTPEVTCVVVDVSHEDPEV |
| | | | | KFNWYVDGVEVHNAKTKPREEQYNSTYRWSVLTVLHQDWLNGKEYKCKVSNKA |
| | | | | LPAPIEKTISKAKGQPREPQVYTLPPSRDELTKNQVSLTCLVKGFYPSDIAVEWESN |
| | | | | GQPENNYKTTPPVLDSDGSFFLYSKLTVDKSRWQQGNVFSCSVMHEALHNHYTQ |
| | | | | KSLSLSPGK |
| 469 | STIM007-full heavy | | Nucleic acid sequence of | CAGATCACCTTGAAGGAGTCTGGTCCTACGCTGGTGAAACCCACACAGACCCTC |
| | chain sequence | | STIM007 heavy chain | ACGCTGACCTGCACCTTCTCTGGGTTCTCACTCAGCACTACTGGAGTGGGTGTG |
| | | | | GGCTGGATCCGTCAGCCCCCAGGAAAGGCCCTGGAGTGGCTTGCAGTCATTTAT |
| | | | | TGGGATGATGATAAGCGCTACAGCCCATCTCTGAAGAGCAGACTCACCATCACC |
| | | | | AAGGACACCTCCAAAAACCAGGTGGTCCTTACAATGACCAACATGGACCCTGTG |
| | | | | GACACAGCCACATATTTCTGTACACACGGATATGGTTCGGCGAGTTATTACCACT |
| | | | | ACGGTATGGACGTCTGGGGCCAAGGGACCACGGTCACCGTCTCCTCA |
| | | | | GCCAGCACCAAGGGCCCCTCTGTGTTCCCTCTGGCCCCTTCCAGCAAGTCCACC |
| | | | | TCTGGCGGAACAGCCGCTCTGGGCTGCCTCGTGAAGGACTACTTCCCCGAGCCT |
| | | | | GTGACCGTGTCCTGGAACTCTGGCGCTCTGACCAGCGGAGTGCACACCTTCCCT |
| | | | | GCTGTGCTGCAGTCCTCCGGCCTGTACTCCCTGTCCTCCGTCGTGACCGTGCCT |
| | | | | TCCAGCTCTCTGGGCACCCAGACCTACATCTGCAACGTGAACCACAAGCCCTCCA |
| | | | | ACACCAAGGTGGACAAGAAGGTGGAACCCAAGTCCTGCGACAAGACCCACACCT |
| | | | | GTCCCCCTTGTCCTGCCCCTGAACTGCTGGGCGGACCTTCCGTGTTCCTGTTCC |
| | | | | CCCCAAAGCCCAAGGACACCCTGATGATCTCCCGGACCCCCGAAGTGACCTGCG |
| | | | | TGGTGGTGGATGTGTCCCACGAGGACCCTGAAGTGAAGTTCAATTGGTACGTGG |
| | | | | ACGGCGTGGAAGTGCACAACGCCAAGACCAAGCCTAGAGAGGAACAGTACAACT |
| | | | | CCACCTACCGGGTGGTGTCCGTGCTGACCGTGCTGCACCAGGATTGGCTGAACG |
| | | | | GCAAAGAGTACAAGTGCAAGGTGTCCAACAAGGCCCTGCCTGCCCCCATCGAAA |
| | | | | AGACCATCTCCAAGGCCAAGGGCCAGCCCCGGGAACCCCAGGTGTACACACTGC |
| | | | | CCCCTAGCAGGGACGAGCTGACCAAGAACCAGGTGTCCCTGACCTGTCTCGTGA |
| | | | | AAGGCTTCTACCCCTCCGATATCGCCGTGGAATGGGAGTCCAACGGCCAGCCTG |
| | | | | AGAACAACTACAAGACCACCCCCCCTGTGCTGGACTCCGACGGCTCATTCTTCCT |
| | | | | GTACAGCAAGCTGACAGTGGACAAGTCCCGGTGGCAGCAGGGCAACGTGTTCTC |
| | | | | CTGCTCCGTGATGCACGAGGCCCTGCACAACCACTACACCCAGAAGTCCCTGTC |
| | | | | CCTGAGCCCCGGCAAGTGATGA |
| 470 | STIM007-CDRL1 | | Amino acid sequence of CDRL1 | QSVTNY |
| | | | of STIM007 using IMGT | |
| 471 | STIM007-CDRL2 | | Amino acid sequence of CDRL2 | DAS |
| | | | of STIM007 using IMGT | |
| 472 | STIM007-CDRL3 | | Amino acid sequence of CDRL3 | QHRSNWPLT |
| | | | of STIM007 using IMGT | |
| 473 | STIM007-Light chain | | Amino acid sequence of V_{L} of | EIVLTQSPATLSLSPGERATLSCRASQSVTNYLAWHQQKPGQAPRLLIYDASNRAT |
| | variable region | | STIM007 | GIPARFSGSGSGTDFTLTISSLEPEDFAVYYCQHRSNWPLTFGGGTKVEIK |
| 474 | STIM007-Light chain | | Nucleic acid sequence of V_{L} of | GAAATTGTATTGACACAGTCTCCAGCCACCCTGTCTTTGTCTCCAGGGGAAAGA |
| | variable region | | STIM007 | GCCACCCTCTCCTGCAGGGCCAGTCAGAGTGTTACCAACTACTTAGCCTGGCAC |
| | | | | CAACAGAAACCTGGCCAGGCTCCCAGGCTCCTCATCTATGATGCATCCAACAGG |
| | | | | GCCACTGGCATCCCAGCCAGGTTCAGTGGCAGTGGGTCTGGGACAGACTTCACT |
| | | | | CTCACCATCAGCAGCCTAGAGCCTGAAGATTTTGCAGTTTATTACTGTCAGCACC |
| | | | | GTAGCAACTGGCCTCTCACTTTCGGCGGAGGGACCAAGGTGGAGATCAAAC |
| 475 | STIM007-full light | | Amino acid sequence of STIM007 | EIVLTQSPATLSLSPGERATLSCRASQSVTNYLAWHQQKPGQAPRLLIYDASNRAT |
| | chain sequence | | light chain | GIPARFSGSGSGTDFTLTISSLEPEDFAVYYCQHRSNWPLTFGGGTKVEIKRTVAAP |
| | | | | SVFIFPPSDEQLKSGTASVVCLLNNFYPREAKVQWKVDNALQSGNSQESVTEQDSK |
| | | | | DSTYSLSSTLTLSKADYEKHKVYACEVTHQGLSSPVTKSFNRGEC |
| 476 | STIM007-full light | | Nucleic acid sequence of | GAAATTGTATTGACACAGTCTCCAGCCACCCTGTCTTTGTCTCCAGGGGAAAGA |
| | chain sequence | | STIM007 light chain | GCCACCCTCTCCTGCAGGGCCAGTCAGAGTGTTACCAACTACTTAGCCTGGCAC |
| | | | | CAACAGAAACCTGGCCAGGCTCCCAGGCTCCTCATCTATGATGCATCCAACAGG |
| | | | | GCCACTGGCATCCCAGCCAGGTTCAGTGGCAGTGGGTCTGGGACAGACTTCACT |
| | | | | CTCACCATCAGCAGCCTAGAGCCTGAAGATTTTGCAGTTTATTACTGTCAGCACC |
| | | | | GTAGCAACTGGCCTCTCACTTTCGGCGGAGGGACCAAGGTGGAGATCAAACcgta |
| | | | | cggtggccgctccctccgtgttcatcttcccaccttccgacgagcagctgaagtccggcaccgcttctgtcg |
| | | | | tgtgcctgctgaacaacttctacccccgcgaggccaaggtgcagtggaaggtggacaacgccctgcagt |
| | | | | ccggcaactcccaggaatccgtgaccgagcaggactccaaggacagcacctactccctgtcctccaccct |
| | | | | gaccctgtccaaggccgactacgagaagcacaaggtgtacgcctgcgaagtgacccaccagggcctgt |
| | | | | ctagccccgtgaccaagtctttcaaccggggcgagtgt |
| 477 | STIM008-CDRH1 | | Amino acid sequence of CDRH1 | GFSLSTSGVG |
| | | | of STIM008 using IMGT | |
| 478 | STIM008-CDRH2 | | Amino acid sequence of CDRH2 | IYWDDDK |
| | | | of STIM008 using IMGT | |
| 479 | STIM008-CDRH3 | | Amino acid sequence of CDRH3 | THGYGSASYYHYGMDV |
| | | | of STIM008 using IMGT | |
| 480 | STIM008-Heavy | | Amino acid sequence of V_{H} of | QITLKESGPTLVKPTQTLTLTCTFSGFSLSTSGVGVGWIRQPPGKALEWLAVIYWD |
| | chain variable region | | STIM008 | DDKRYSPSLKSRLTITKDTSKNQVVLTMTNMDPVDTATYFCTHGYGSASYYHYGM |
| | | | | DVWGQGTTVTVSS |
| 481 | STIM008-Heavy | | Nucleic acid sequence of V_{H} of | CAGATCACCTTGAAGGAGTCTGGTCCTACGCTGGTGAAACCCACACAGACCCTC |
| | chain variable region | | STIM008 | ACGCTGACCTGCACCTTCTCTGGGTTCTCACTCAGCACTAGTGGAGTGGGTGTG |
| | | | | GGCTGGATCCGTCAGCCCCCAGGAAAGGCCCTGGAGTGGCTTGCAGTCATTTAT |
| | | | | TGGGATGATGATAAGCGCTACAGCCCATCTCTGAAGAGCAGGCTCACCATCACC |
| | | | | AAGGACACCTCCAAAAACCAGGTGGTCCTTACAATGACCAACATGGACCCTGTG |
| | | | | GACACAGCCACATATTTCTGTACACACGGATATGGTTCGGCGAGTTATTACCACT |
| | | | | ACGGTATGGACGTCTGGGGCCAAGGGACCACGGTCACCGTCTCCTCA |
| 482 | STIM008-full heavy | | Amino acid sequence of STIM008 | QITLKESGPTLVKPTQTLTLTCTFSGFSLSTSGVGVGWIRQPPGKALEWLAVIYWD |
| | chain sequence | | heavy chain | DDKRYSPSLKSRLTITKDTSKNQVVLTMTNMDPVDTATYFCTHGYGSASYYHYGM |
| | | | | DVWGQGTTVWSSASTKGPSVFPLAPSSKSTSGGTAALGCLVKDYFPEPVTVSWN |
| | | | | SGALTSGVHTFPAVLQSSGLYSLSSVVTVPSSSLGTQTYICNVNHKPSNTKVDKKVE |
| | | | | PKSCDKTHTCPPCPAPELLGGPSVFLFPPKPKDTLMISRTPEVTCVVVDVSHEDPEV |
| | | | | KFNWYVDGVEVHNAKTKPREEQYNSTYRVVSVLTVLHQDWLNGKEYKCKVSNKA |
| | | | | LPAPIEKTISKAKGQPREPQVYTLPPSRDELTKNQVSLTCLVKGFYPSDIAVEWESN |
| | | | | GQPENNYKTTPPVLDSDGSFFLYSKLTVDKSRWQQGNVFSCSVMHEALHNHYTQ |
| | | | | KSLSLSPGK |
| 483 | STIM008-full heavy | | Nucleic acid sequence of | CAGATCACCTTGAAGGAGTCTGGTCCTACGCTGGTGAAACCCACACAGACCCTC |
| | chain sequence | | STIM008 heavy chain | ACGCTGACCTGCACCTTCTCTGGGTTCTCACTCAGCACTAGTGGAGTGGGTGTG |
| | | | | GGCTGGATCCGTCAGCCCCCAGGAAAGGCCCTGGAGTGGCTTGCAGTCATTTAT |
| | | | | TGGGATGATGATAAGCGCTACAGCCCATCTCTGAAGAGCAGGCTCACCATCACC |
| | | | | AAGGACACCTCCAAAAACCAGGTGGTCCTTACAATGACCAACATGGACCCTGTG |
| | | | | GACACAGCCACATATTTCTGTACACACGGATATGGTTCGGCGAGTTATTACCACT |
| | | | | ACGGTATGGACGTCTGGGGCCAAGGGACCACGGTCACCGTCTCCTCAGCCAGCA |
| | | | | CCAAGGGCCCCTCTGTGTTCCCTCTGGCCCCTTCCAGCAAGTCCACCTCTGGCG |
| | | | | GAACAGCCGCTCTGGGCTGCCTCGTGAAGGACTACTTCCCCGAGCCTGTGACCG |
| | | | | TGTCCTGGAACTCTGGCGCTCTGACCAGCGGAGTGCACACCTTCCCTGCTGTGC |
| | | | | TGCAGTCCTCCGGCCTGTACTCCCTGTCCTCCGTCGTGACCGTGCCTTCCAGCT |
| | | | | CTCTGGGCACCCAGACCTACATCTGCAACGTGAACCACAAGCCCTCCAACACCAA |
| | | | | GGTGGACAAGAAGGTGGAACCCAAGTCCTGCGACAAGACCCACACCTGTCCCCC |
| | | | | TTGTCCTGCCCCTGAACTGCTGGGCGGACCTTCCGTGTTCCTGTTCCCCCCAAA |
| | | | | GCCCAAGGACACCCTGATGATCTCCCGGACCCCCGAAGTGACCTGCGTGGTGGT |
| | | | | GGATGTGTCCCACGAGGACCCTGAAGTGAAGTTCAATTGGTACGTGGACGGCGT |
| | | | | GGAAGTGCACAACGCCAAGACCAAGCCTAGAGAGGAACAGTACAACTCCACCTA |
| | | | | CCGGGTGGTGTCCGTGCTGACCGTGCTGCACCAGGATTGGCTGAACGGCAAAG |
| | | | | AGTACAAGTGCAAGGTGTCCAACAAGGCCCTGCCTGCCCCCATCGAAAAGACCA |
| | | | | TCTCCAAGGCCAAGGGCCAGCCCCGGGAACCCCAGGTGTACACACTGCCCCCTA |
| | | | | GCAGGGACGAGCTGACCAAGAACCAGGTGTCCCTGACCTGTCTCGTGAAAGGCT |
| | | | | TCTACCCCTCCGATATCGCCGTGGAATGGGAGTCCAACGGCCAGCCTGAGAACA |
| | | | | ACTACAAGACCACCCCCCCTGTGCTGGACTCCGACGGCTCATTCTTCCTGTACAG |
| | | | | CAAGCTGACAGTGGACAAGTCCCGGTGGCAGCAGGGCAACGTGTTCTCCTGCTC |
| | | | | CGTGATGCACGAGGCCCTGCACAACCACTACACCCAGAAGTCCCTGTCCCTGAG |
| | | | | CCCCGGCAAGTGATGA |
| 484 | STIM008-CDRL1 | | Amino acid sequence of CDRL1 | QSVTNY |
| | | | of STIM008 using IMGT | |
| 485 | STIM008-CDRL2 | | Amino acid sequence of CDRL2 | DAS |
| | | | of STIM008 using IMGT | |
| 486 | STIM008-CDRL3 | | Amino acid sequence of CDRL3 | QQRSNWPLT |
| | | | of STIM008 using IMGT | |
| 487 | STIM008-Light chain | | Amino acid sequence of V_{L} of | EIVLTQSPATLSLSPGERATLSCRASQSVTNYLAWHQQKPGQAPRLLIYDASNRAT |
| | variable region | | STIM008 | GIPARFSGSGSGTDFTLTISSLEPEDFAVYYCQQRSNWPLTFGGGTKVEIK |
| 488 | STIM008-Light chain | | Nucleic acid sequence of V_{L} of | GAAATTGTGTTGACACAGTCTCCAGCCACCCTGTCTTTGTCTCCAGGGGAAAGA |
| | variable region | | STIM008 | GCCACCCTCTCCTGCAGGGCCAGTCAGAGTGTTACCAACTACTTAGCCTGGCAC |
| | | | | CAACAGAAACCTGGCCAGGCTCCCAGGCTCCTCATCTATGATGCATCCAACAGG |
| | | | | GCCACTGGCATCCCAGCCAGGTTCAGTGGCAGTGGGTCTGGGACAGACTTCACT |
| | | | | CTCACCATCAGCAGCCTAGAGCCTGAAGATTTTGCAGTTTATTACTGTCAGCAGC |
| | | | | GTAGCAACTGGCCTCTCACTTTCGGCGGAGGGACCAAGGTGGAGATCAAA |
| 489 | STIM008-full light | | Amino acid sequence of STIM008 | EIVLTQSPATLSLSPGERATLSCRASQSVTNYLAWHQQKPGQAPRLLIYDASNRAT |
| | chain sequence | | light chain | GIPARFSGSGSGTDFTLTISSLEPEDFAVYYCQQRSNWPLTFGGGTKVEIKRTVAAP |
| | | | | SVFIFPPSDEQLKSGTASVVCLLNNFYPREAKVQWKVDNALQSGNSQESVTEQDSK |
| | | | | DSTYSLSSTLTLSKADYEKHKVYACEVTHQGLSSPVTKSFNRGEC |
| 490 | STIM008-full light | | Nucleic acid sequence of | GAAATTGTGTTGACACAGTCTCCAGCCACCCTGTCTTTGTCTCCAGGGGAAAGA |
| | chain sequence | | STIM008 light chain | GCCACCCTCTCCTGCAGGGCCAGTCAGAGTGTTACCAACTACTTAGCCTGGCAC |
| | | | | CAACAGAAACCTGGCCAGGCTCCCAGGCTCCTCATCTATGATGCATCCAACAGG |
| | | | | GCCACTGGCATCCCAGCCAGGTTCAGTGGCAGTGGGTCTGGGACAGACTTCACT |
| | | | | CTCACCATCAGCAGCCTAGAGCCTGAAGATTTTGCAGTTTATTACTGTCAGCAGC |
| | | | | GTAGCAACTGGCCTCTCACTTTCGGCGGAGGGACCAAGGTGGAGATCAAAcgtac |
| | | | | ggtggccgctccctccgtgttcatcttcccaccttccgacgagcagctgaagtccggcaccgcttctgtcgt |
| | | | | gtgcctgctgaacaacttctacccccgcgaggccaaggtgcagtggaaggtggacaacgccctgcagtc |
| | | | | cggcaactcccaggaatccgtgaccgagcaggactccaaggacagcacctactccctgtcctccaccctg |
| | | | | accctgtccaaggccgactacgagaagcacaaggtgtacgcctgcgaagtgacccaccagggcctgtct |
| | | | | agccccgtgaccaagtctttcaaccggggcgagtgt |
| 491 | STIM009-CDRH1 | | Amino acid sequence of CDRH1 | GFTFSDYY |
| | | | of STIM009 using IMGT | |
| 492 | STIM009-CDRH2 | | Amino acid sequence of CDRH2 | ISSSGSTI |
| | | | of STIM009 using IMGT | |
| 493 | STIM009-CDRH3 | | Amino acid sequence of CDRH3 | ARDFYDILTDSPYFYYGVDV |
| | | | of STIM009 using IMGT | |
| 494 | STIM009-Heavy | | Amino acid sequence of V_{H} of | QVQLVESGGGLVKPGGSLRLSCAASGFTFSDYYMSWIRQAPGKGLEWVSYISSSGS |
| | chain variable region | | STIM009 | TIYYADSVKGRFTISRDNAKNSLYLQINSLRAEDTAVYYCARDFYDILTDSPYFYYG |
| | | | | VDVWGQGTTVTVSS |
| 495 | STIM009-Heavy | | Nucleic acid sequence of V_{H} of | CAGGTGCAGCTGGTGGAGTCTGGGGGAGGCTTGGTCAAGCCTGGAGGGTCCCT |
| | chain variable region | | STIM009 | GAGACTCTCCTGTGCAGCCTCTGGATTCACCTTCAGTGACTACTACATGAGCTG |
| | | | | GATCCGCCAGGCTCCAGGGAAGGGGCTGGAGTGGGTTTCATACATTAGTAGTA |
| | | | | GTGGTAGTACCATATACTACGCAGACTCTGTGAAGGGCCGATTCACCATCTCCA |
| | | | | GGGACAACGCCAAGAACTCACTGTATCTGCAAATTAACAGCCTGAGAGCCGAGG |
| | | | | ACACGGCCGTGTATTACTGTGCGAGAGATTTTTACGATATTTTGACTGATAGTC |
| | | | | CGTACTTCTACTACGGTGTGGACGTCTGGGGCCAAGGGACCACGGTCACCGTCT |
| | | | | CCTCA |
| 496 | STIM009-full heavy | | Amino acid sequence of STIM009 | QVQLVESGGGLVKPGGSLRLSCAASGFTFSDYYMSWIRQAPGKGLEWVSYISSSGS |
| | chain sequence | | heavy chain | TIYYADSVKGRFTISRDNAKNSLYLQINSLRAEDTAVYYCARDFYDILTDSPYFYYG |
| | | | | VDVWGQGTTVTVSSASTKGPSVFPLAPSSKSTSGGTAALGCLVKDYFPEPVTVSW |
| | | | | NSGALTSGVHTFPAVLQSSGLYSLSSVVTVPSSSLGTQTYICNVNHKPSNTKVDKK |
| | | | | VEPKSCDKTHTCPPCPAPELLGGPSVFLFPPKPKDTLMISRTPEVTCVVVDVSHEDP |
| | | | | EVKFNWYVDGVEVHNAKTKPREEQYNSTYRVVSVLTVLHQDWLNGKEYKCKVSN |
| | | | | KALPAPIEKTISKAKGQPREPQVYTLPPSRDELTKNQVSLTCLVKGFYPSDIAVEWE |
| | | | | SNGQPENNYKTTPPVLDSDGSFFLYSKLTVDKSRWQQGNVFSCSVMHEALHNHYT |
| | | | | QKSLSLSPGK |
| 497 | STIM009-full heavy | | Nucleic acid sequence of | CAGGTGCAGCTGGTGGAGTCTGGGGGAGGCTTGGTCAAGCCTGGAGGGTCCCT |
| | chain sequence | | STIM009 heavy chain | GAGACTCTCCTGTGCAGCCTCTGGATTCACCTTCAGTGACTACTACATGAGCTG |
| | | | | GATCCGCCAGGCTCCAGGGAAGGGGCTGGAGTGGGTTTCATACATTAGTAGTA |
| | | | | GTGGTAGTACCATATACTACGCAGACTCTGTGAAGGGCCGATTCACCATCTCCA |
| | | | | GGGACAACGCCAAGAACTCACTGTATCTGCAAATTAACAGCCTGAGAGCCGAGG |
| | | | | ACACGGCCGTGTATTACTGTGCGAGAGATTTTTACGATATTTTGACTGATAGTC |
| | | | | CGTACTTCTACTACGGTGTGGACGTCTGGGGCCAAGGGACCACGGTCACCGTCT |
| | | | | CCTCAGCCAGCACCAAGGGCCCCTCTGTGTTCCCTCTGGCCCCTTCCAGCAAGT |
| | | | | CCACCTCTGGCGGAACAGCCGCTCTGGGCTGCCTCGTGAAGGACTACTTCCCCG |
| | | | | AGCCTGTGACCGTGTCCTGGAACTCTGGCGCTCTGACCAGCGGAGTGCACACCT |
| | | | | TCCCTGCTGTGCTGCAGTCCTCCGGCCTGTACTCCCTGTCCTCCGTCGTGACCG |
| | | | | TGCCTTCCAGCTCTCTGGGCACCCAGACCTACATCTGCAACGTGAACCACAAGCC |
| | | | | CTCCAACACCAAGGTGGACAAGAAGGTGGAACCCAAGTCCTGCGACAAGACCCA |
| | | | | CACCTGTCCCCCTTGTCCTGCCCCTGAACTGCTGGGCGGACCTTCCGTGTTCCT |
| | | | | GTTCCCCCCAAAGCCCAAGGACACCCTGATGATCTCCCGGACCCCCGAAGTGAC |
| | | | | CTGCGTGGTGGTGGATGTGTCCCACGAGGACCCTGAAGTGAAGTTCAATTGGTA |
| | | | | CGTGGACGGCGTGGAAGTGCACAACGCCAAGACCAAGCCTAGAGAGGAACAGT |
| | | | | ACAACTCCACCTACCGGGTGGTGTCCGTGCTGACCGTGCTGCACCAGGATTGGC |
| | | | | TGAACGGCAAAGAGTACAAGTGCAAGGTGTCCAACAAGGCCCTGCCTGCCCCCA |
| | | | | TCGAAAAGACCATCTCCAAGGCCAAGGGCCAGCCCCGGGAACCCCAGGTGTACA |
| | | | | CACTGCCCCCTAGCAGGGACGAGCTGACCAAGAACCAGGTGTCCCTGACCTGTC |
| | | | | TCGTGAAAGGCTTCTACCCCTCCGATATCGCCGTGGAATGGGAGTCCAACGGCC |
| | | | | AGCCTGAGAACAACTACAAGACCACCCCCCCTGTGCTGGACTCCGACGGCTCAT |
| | | | | TCTTCCTGTACAGCAAGCTGACAGTGGACAAGTCCCGGTGGCAGCAGGGCAACG |
| | | | | TGTTCTCCTGCTCCGTGATGCACGAGGCCCTGCACAACCACTACACCCAGAAGT |
| | | | | CCCTGTCCCTGAGCCCCGGCAAGTGATGA |
| 498 | STIM009-CDRL1 | | Amino acid sequence of CDRL1 | QSLLHSNGYNY |
| | | | of STIM009 using IMGT | |
| 499 | STIM009-CDRL2 | | Amino acid sequence of CDRL2 | LGS |
| | | | of STIM009 using IMGT | |
| 500 | STIM009-CDRL3 | | Amino acid sequence of CDRL3 | MQALQTPRT |
| | | | of STIM009 using IMGT | |
| 501 | STIM009-Light chain | | Amino acid sequence of V_{L} of | DIVMTQSPLSLPVTPGEPASISCRSSQSLLHSNGYNYLDWYLQKPGQSPQLLIYLGS |
| | variable region | | STIM009 | NRASGVPDRFSGSGSGTDFTLKISRVEAEDVGVYYCMQALQTPRTFGQGTKVEIK |
| 502 | STIM009-Light chain | | Nucleic acid sequence of V_{L} of | GATATTGTGATGACTCAGTCTCCACTCTCCCTGCCCGTCACCCCTGGAGAGCCG |
| | variable region | | STIM009 | GCCTCCATCTCCTGCAGGTCTAGTCAGAGCCTCCTGCATAGTAATGGATACAACT |
| | | | | ATTTGGATTGGTACCTGCAGAAGCCAGGGCAGTCTCCACAGCTCCTGATCTATT |
| | | | | TGGGTTCTAATCGGGCCTCCGGGGTCCCTGACAGGTTCAGTGGCAGTGGATCA |
| | | | | GGCACAGATTTTACACTGAAAATCAGCAGAGTGGAGGCTGAGGATGTTGGGGTT |
| | | | | TATTACTGCATGCAAGCTCTACAAACTCCTCGGACGTTCGGCCAAGGGACCAAG |
| | | | | GTGGAAATCAAA |
| 503 | STIM009-full light | | Amino acid sequence of STIM009 | DIVMTQSPLSLPVTPGEPASISCRSSQSLLHSNGYNYLDWYLQKPGQSPQLLIYLGS |
| | chain sequence | | light chain | NRASGVPDRFSGSGSGTDFTLKISRVEAEDVGVYYCMQALQTPRTFGQGTKVEIKR |
| | | | | TVAAPSVFIFPPSDEQLKSGTASVVCLLNNFYPREAKVQWKVDNALQSGNSQESVT |
| | | | | EQDSKDSTYSLSSTLTLSKADYEKHKVYACEVTHQGLSSPVTKSFNRGEC |
| 504 | STIM009-full light | | Nucleic acid sequence of | GATATTGTGATGACTCAGTCTCCACTCTCCCTGCCCGTCACCCCTGGAGAGCCG |
| | chain sequence | | STIM009 light chain | GCCTCCATCTCCTGCAGGTCTAGTCAGAGCCTCCTGCATAGTAATGGATACAACT |
| | | | | ATTTGGATTGGTACCTGCAGAAGCCAGGGCAGTCTCCACAGCTCCTGATCTATT |
| | | | | TGGGTTCTAATCGGGCCTCCGGGGTCCCTGACAGGTTCAGTGGCAGTGGATCA |
| | | | | GGCACAGATTTTACACTGAAAATCAGCAGAGTGGAGGCTGAGGATGTTGGGGTT |
| | | | | TATTACTGCATGCAAGCTCTACAAACTCCTCGGACGTTCGGCCAAGGGACCAAG |
| | | | | GTGGAAATCAAAcgtacggtggccgctccctccgtgttcatcttcccaccttccgacgagcagctgaa |
| | | | | gtccggcaccgcttctgtcgtgtgcctgctgaacaacttctacccccgcgaggccaaggtgcagtggaag |
| | | | | gtggacaacgccctgcagtccggcaactcccaggaatccgtgaccgagcaggactccaaggacagcac |
| | | | | ctactccctgtcctccaccctgaccctgtccaaggccgactacgagaagcacaaggtgtacgcctgcgaa |
| | | | | gtgacccaccagggcctgtctagccccgtgaccaagtctttcaaccggggcgagtgt |
| 505 | Human PD-L1 Flag His | | Amino acid sequence of | FTVTVPKDLYVVEYGSNMTIECKFPVEKQLDLAALIVYWEMEDKNIIQFVHGEEDLK |
| | (KYPROT286) | | KYPROT286 with FLAG tag in | VQHSSYRQRARLLKDQLSLGNAALQITDVKLQDAGVYRCMISYGGADYKRINKV |
| | | | bold and underlined and | NAPYNKINQRILVVDPVISEHELTCQAEGYPKAEVIWTSSDHQVLSGKTITTNSKR |
| | | | histidine tag in bold | EEKLFNVTSTLRINTTTNEIFYCTFRRLDPEENHTAELVIPELPLAHPPNERTIEGRD |
| | | | | YKDDDDKHHHHHH |
| 506 | Mature human ICOS | | Mature amino acid sequence of | EINGSANYEMFIFHNGGVQILCKYPDIVQQFKMQLLKGGQILCDLTKTKGSGNIVSI |
| | | | human ICOS | KSLKFCHSQLSNNSVSFFLYNLDHSHANYYFCNLSIFDPPPFKVTLTGGYLHIYESQL |
| | | | | CCQLKFWLPIGCAAFVVVCILGCILICWLTKKKYSSSVHDPNGEYMFMRAVNTAKK |
| | | | | SRLTDVTL |
| 507 | Human ICOS | | Amino acid sequence of human | EINGSANYEMFIFHNGGVQILCKYPDIVQQFKMQLLKGGQILCDLTKTKGSGNIVSI |
| | extracellular domain | | ICOS extracellular domain | KSLKFCHSQLSNNSVSFFLYNLDHSHANYYFCNLSIFDPPPFKVTLTGGYLHIYESQL |
| | | | | CCQLKF |
| 508 | Human ICOS with | | Amino acid sequence of human | MKSGLWYFFLFCLRIKVLTGEINGSANYEMFIFHNGGVQILCKYPDIVQQFKMQLLK |
| | signal peptide | | ICOS (signal peptide is | GGQILCDLTKTKGSGNTVSIKSLKFCHSQLSNNSVSFFLYNLDHSHANYYFCNLSIF |
| | | | underlined) | DPPPFKVTLTGGYLHIYESQLCCQLKFWLPIGCAARNVCILGCILICWLIKKKYSSS |
| | | | | VHDPNGEYMFMRAVNTAKKSRLTDVTL |
| 509 | Isoform of human | | Amino acid sequence of a human | The sequence of this isofornn differs from the canonical sequence in its |
| | ICOS (Q9Y6W8-2) | | ICOS isoform | cytoplasmic domain as follows: 168-199: |
| | | | | KYSSSVHDPNGEYMFMRAVNTAKKSRLTDVTLM |
| 510 | Mature mouse ICOS | | Amino acid sequence of mature | EINGSADHRMFSFHNGGVQISCKYPETVQQLKMRLFREREVLCELTKTKGSGNAVS |
| | mouse ICOS | | | IKNPMLCLYHLSNNSVSFFLNNPDSSQGSYYFCSLSIFDPPPFQERNLSGGYLHIYES |
| | | | | QLCCQLKTVVQVTE |
| 511 | Mouse ICOS | | Amino acid sequence of the | EINGSADHRMFSFHNGGVQISCKYPETVQQLKMRLFREREVLCELTKTKGSGNAVS |
| | extracellular domain | | extracellular domain of mouse | IKNPMLCLYHLSNNSVSFFLNNPDSSQGSYYFCSLSIFDPPPFQERNLSGGYLHIYES |
| | | | ICOS | QLCCQLK |
| 512 | Mouse ICOS with | | Amino acid sequence of mouse | MGWSCIILFLVATATGVHSEINGSADHRMFSFHNGGVQISCKYPETVQQLKMRLFR |
| | signal peptide | | ICOS (signal peptide is | EREVLCELTKTKGSGNAVSIKNPMLCLYHLSNNSVSFFLNNPDSSQGSYYFCSLSIF |
| | | | underlined) | DPPPFQERNLSGGYLHIYESQLCCQLKTVVQVTE |
| 513 | Cynomolgus ICOS with | | Amino acid sequence of | MKSGLVVYFFL FCLHMKVLTG EINGSANYEM FIFHNGGVQI LCKYPDIVQQ |
| | signal peptide | | cynomolgus ICOS (signal peptide | FKMQLLKGGQILCDLTKTKGSGNKVSIKSLKFCHSQLSNNSVSFFLYNLD |
| | | | is underlined) | RSHANYYFCNLSIFDPPPFKVTLIGGYLHIYESQLCCQLKFWLPIGCATF |
| | | | | VVVCIFGCILICWLTKKKYSSTVHDPNGEYMFMRAVNTAKKSRLTGTTP |
| 514 | Cynomolgus ICOS | | Amino acid sequence of | EINGSANYEMFIFHNGGVQILCKYPDIVQQFKMQLLKGGQILCDLTKTKG |
| | extracellular domain | | cynomolgus ICOS extracellular | SGNINSIKSLKFCHSQLSNNSVSFFLYNLDRSHANYYFCNLSIFDPPPFK |
| | | | domain | VTLTGGYLHIYESQLCCQLK |
| 515 | Human ICOS ligand | | Amino acid sequence of human | DTQEKEVRAMVGSDVELSCACPEGSRFDLNDVYVYWQTSESKTVVTYHIPQNSSL |
| | | | ICOS ligand comprising | ENVDSRYRNRALMSPAGMLRGDFSLRLFNVTPQDEQKFHCLVLSQSLGFQEVLSVE |
| | | | extracellular domain | VTLHVAANFSVPVVSAPHSPSQDELTFTCTSINGYPRPNVYWINKTDNSLLDQALQ |
| | | | | NDTVFLNMRGLYDVVSVLRIARTPSVNIGCCIENVLLQQNLTVGSQTGNDIGERDK |
| | | | | ITENPVSTGEKNAATWS |
| 516 | Human ICOS ligand | | | MRLGSPGLLFLLFSSLRADTQEKEVRAMVGSDVELSCACPEGSRFDLNDVYVYWQT |
| | | | | SESKTVVTYHIPQNSSLENVDSRYRNRALMSPAGMLRGDFSLRLFNVTPQDEQKFH |
| | | | | CLVLSQSLGFQEVLSVEVTLHVAANFSVPVVSAPHSPSQDELTFTCTSINGYPRPNV |
| | | | | YWINKTDNSLLDQALQNDTVFLNMRGLYDVVSVLRIARTPSVNIGCCIENVLLQQN |
| | | | | LTVGSQTGNDIGERDKITENPVSTGEKNAATWSILAVLCLLVVVAVAIGWVCRDRC |
| | | | | LQHSYAGAWAVSPETELTGHV |
| 517 | C-terminal amino acid | | Amino acids 21 to 133 of hIL-2 | LQMILNGINNYKNPKLTAMLTFKFYMPKKATELKHLQCLEEELKPLEEVLNLAQSKN |
| | sequence of hIL-2 | | with R38W mutation (bold & | FHLRPRDLISNINVIVLELKGSETTFMCEYADETATIVEFLNRWITFCQSIISTLT |
| | | | underlined) | |
| 518 | C-terminal amino acid | | Amino acids 21 to 133 of hIL-2 | LQMILNGINNYKNPKLTQMLTFKFYMPKKATELKHLQCLEEELKPLEEVLNLAQSKN |
| | sequence of hIL-2 | | with R38Q mutation (bold & | FHLRPRDLISNINVIVLELKGSETTFMCEYADETATIVEFLNRWITFCQSIISTLT |
| | | | underlined) | |
| 519 | STIM002-Corrected | | Nucleic acid sequence of | GATATTGTGATGACTCAGTCTCCACTCTCCCTGCCCGTCACCCCTGGAGAGCCG |
| | Light chain variable | | corrected VL of STIM002 | GCCTCCATCTCCTGCAGGTCTAGTCAGAGCCTCCTGCATAGTGATGGATACAAC |
| | region | | | TATTTGGATTGGTACCTGCAGAAGCCAGGGCAGTCTCCACAGCTCCTGATCTAT |
| | | | | TTGGGTTCTACTCGGGCCTCCGGGTTCCCTGACAGGTTCAGTGGCAGTGGATCA |
| | | | | GGCACAGATTTTACACTGAAAATCAGCAGAGTGGAGGCTGAGGATGTTGGGGTT |
| | | | | TATTACTGCATGCAAGCTCTACAAACTCCGCTCAGTTTTGGCCAGGGGACCAAG |
| | | | | CTGGAGATCAAA |
| 520 | STIM002-Corrected | | Nucleic acid sequence of | GATATTGTGATGACTCAGTCTCCACTCTCCCTGCCCGTCACCCCTGGAGAGCCG |
| | full light chain | | corrected STIM002 light chain | GCCTCCATCTCCTGCAGGTCTAGTCAGAGCCTCCTGCATAGTGATGGATACAAC |
| | sequence | | | TATTTGGATTGGTACCTGCAGAAGCCAGGGCAGTCTCCACAGCTCCTGATCTAT |
| | | | | TTGGGTTCTACTCGGGCCTCCGGGTTCCCTGACAGGTTCAGTGGCAGTGGATCA |
| | | | | GGCACAGATTTTACACTGAAAATCAGCAGAGTGGAGGCTGAGGATGTTGGGGIT |
| | | | | TATTACTGCATGCAAGCTCTACAAACTCCGCTCAGTTTTGGCCAGGGGACCAAG |
| | | | | CTGGAGATCAAAcgtacggtggccgctccctccgtgttcatcttcccaccttccgacgagcagctgaa |
| | | | | gtccggcaccgcttctgtcgtgtgcctgctgaacaacttctacccccgcgaggccaaggtgcagtggaag |
| | | | | gtggacaacgccctgcagtccggcaactcccaggaatccgtgaccgagcaggactccaaggacagcac |
| | | | | ctactccctgtcctccaccctgaccctgtccaaggccgactacgagaagcacaaggtgtacgcctgcgaa |
| | | | | gtgacccaccagggcctgtctagccccgtgaccaagtctttcaaccggggcgagtgt |
| 521 | STIM003-Corrected | | Nucleic acid sequence of | GAGGTGCAGCTGGTGGAGTCTGGGGGAGGTGTGGTACGGCCTGGGGGGTCCCT |
| | heavy chain variable | | corrected VH of STIM003 | GAGACTCTCCTGTGTAGCCTCTGGAGTCACCTTTGATGATTATGGCATGAGCTG |
| | region | | | GGTCCGCCAAGCTCCAGGGAAGGGGCTGGAGTGGGTCTCTGGTATTAATTGGA |
| | | | | ATGGTGGCGACACAGATTATTCAGACTCTGTGAAGGGCCGATTCACCATCTCCA |
| | | | | GAGACAACGCCAAGAACTCCCTGTATCTACAAATGAATAGTCTGAGAGCCGAGG |
| | | | | ACACGGCCTTGTATTACTGTGCGAGGGATTTCTATGGTTCGGGGAGTTATTATC |
| | | | | ACGTTCCTTTTGACTACTGGGGCCAGGGAATCCTGGTCACCGTCTCCTCA |
| 522 | STIM003-Corrected | | Nucleic acid sequence of | GAGGTGCAGCTGGTGGAGTCTGGGGGAGGTGTGGTACGGCCTGGGGGGTCCCT |
| | full heavy chain | | corrected STIM003 heavy chain | GAGACTCTCCTGTGTAGCCTCTGGAGTCACCTTTGATGATTATGGCATGAGCTG |
| | sequence | | | GGTCCGCCAAGCTCCAGGGAAGGGGCTGGAGTGGGTCTCTGGTATTAATTGGA |
| | | | | ATGGTGGCGACACAGATTATTCAGACTCTGTGAAGGGCCGATTCACCATCTCCA |
| | | | | GAGACAACGCCAAGAACTCCCTGTATCTACAAATGAATAGTCTGAGAGCCGAGG |
| | | | | ACACGGCCTTGTATTACTGTGCGAGGGATTTCTATGGTTCGGGGAGTTATTATC |
| | | | | ACGTTCCTTTTGACTACTGGGGCCAGGGAATCCTGGTCACCGTCTCCTCAGCCA |
| | | | | GCACCAAGGGCCCCTCTGTGTTCCCTCTGGCCCCTTCCAGCAAGTCCACCTCTG |
| | | | | GCGGAACAGCCGCTCTGGGCTGCCTCGTGAAGGACTACTTCCCCGAGCCTGTGA |
| | | | | CCGTGTCCTGGAACTCTGGCGCTCTGACCAGCGGAGTGCACACCTTCCCTGCTG |
| | | | | TGCTGCAGTCCTCCGGCCTGTACTCCCTGTCCTCCGTCGTGACCGTGCCTTCCA |
| | | | | GCTCTCTGGGCACCCAGACCTACATCTGCAACGTGAACCACAAGCCCTCCAACAC |
| | | | | CAAGGTGGACAAGAAGGTGGAACCCAAGTCCTGCGACAAGACCCACACCTGTCC |
| | | | | CCCTTGTCCTGCCCCTGAACTGCTGGGCGGACCTTCCGTGTTCCTGTTCCCCCC |
| | | | | AAAGCCCAAGGACACCCTGATGATCTCCCGGACCCCCGAAGTGACCTGCGTGGT |
| | | | | GGTGGATGTGTCCCACGAGGACCCTGAAGTGAAGTTCAATTGGTACGTGGACG |
| | | | | GCGTGGAAGTGCACAACGCCAAGACCAAGCCTAGAGAGGAACAGTACAACTCCA |
| | | | | CCTACCGGGTGGTGTCCGTGCTGACCGTGCTGCACCAGGATTGGCTGAACGGCA |
| | | | | AAGAGTACAAGTGCAAGGTGTCCAACAAGGCCCTGCCTGCCCCCATCGAAAAGA |
| | | | | CCATCTCCAAGGCCAAGGGCCAGCCCCGGGAACCCCAGGTGTACACACTGCCCC |
| | | | | CTAGCAGGGACGAGCTGACCAAGAACCAGGTGTCCCTGACCTGTCTCGTGAAAG |
| | | | | GCTTCTACCCCTCCGATATCGCCGTGGAATGGGAGTCCAACGGCCAGCCTGAGA |
| | | | | ACAACTACAAGACCACCCCCCCTGTGCTGGACTCCGACGGCTCATTCTTCCTGTA |
| | | | | CAGCAAGCTGACAGTGGACAAGTCCCGGTGGCAGCAGGGCAACGTGTTCTCCTG |
| | | | | CTCCGTGATGCACGAGGCCCTGCACAACCACTACACCCAGAAGTCCCTGTCCCT |
| | | | | GAGCCCCGGCAAGTGATGA |
| 523 | Human | IGHG1*0 | Human Heavy Chain Constant | gcctccaccaagggcccatcggtcttccccctggcaccctcctccaagagcacctctgggggcacagcgg |
| | IgG1 | 3 | Region (IGHG1*03) Nucleotide | ccctgggctgcctggtcaaggactacttccccgaaccggtgacggtgtcgtggaactcaggcgccctgac |
| | constant | | Sequence | cagcggcgtgcacaccttcccggctgtcctacagtcctcaggactctactccctcagcagcgtggtgaccg |
| | region | | | tgccctccagcagcttgggcacccagacctacatctgcaacgtgaatcacaagcccagcaacaccaagg |
| | | | | tggacaagagagttgagcccaaatcttgtgacaaaactcacacatgcccaccgtgcccagcacctgaact |
| | | | | cctggggggaccgtcagtcttcctcttccccccaaaacccaaggacaccctcatgatctcccggacccctg |
| | | | | aggtcacatgcgtggtggtggacgtgagccacgaagaccctgaggtcaagttcaactggtacgtggacg |
| | | | | gcgtggaggtgcataatgccaagacaaagccgcgggaggagcagtacaacagcacgtaccgtgtggt |
| | | | | cagcgtcctcaccgtcctgcaccaggactggctgaatggcaaggagtacaagtgcaaggtctccaacaa |
| | | | | agccctcccagcccccatcgagaaaaccatctccaaagccaaagggcagccccgagaaccacaggtgt |
| | | | | acaccctgcccccatcccgggaggagatgaccaagaaccaggtcagcctgacctgcctggtcaaaggct |
| | | | | tctatcccagcgacatcgccgtggagtgggagagcaatgggcagccggagaacaactacaagaccac |
| | | | | gcctcccgtgctggactccgacggctccttcttcctctatagcaagctcaccgtggacaagagcaggtggc |
| | | | | agcaggggaacgtcttctcatgctccgtgatgcatgaggctctgcacaaccactacacgcagaagagcct |
| | | | | ctccctqtccccgggtaaa |
| 524 | | | Human Heavy Chain Constant | A S T K G P S V F P L A P S S K S T S G G T A A L G C L V K D Y F P E P V T |
| | | | Region (IGHG1*03) Protein | V S W N S G A L T S G V H T F P A V L Q S S G L Y S L S S V V T V P S S S |
| | | | Sequence | L G T Q T Y I C N V N H K P S N T K V D K R V E P K S C D K T H T C P P C |
| | | | | P A P E L L G G P S V F L F P P K P K D T L M I S R T P E V T C V V V D V S |
| | | | | H E D P E V K F N W Y V D G V E V H N A K T K P R E E Q Y N S T Y R V V |
| | | | | S V L T V L H Q D W L N G K E Y K C K V S N K A L P A P I E K T I S K A K |
| | | | | G Q P R E P Q V Y T L P P S R E E M T K N Q V S L T C L V K G F Y P S D I |
| | | | | A V E W E S N G Q P E N N Y K T T P P V L D S D G S F F L Y S K L T V D K |
| | | | | S R W Q Q G N V F S C S V M H E A L H N H Y T Q K S L S L S P G K |
| 525 | Human | IGHG1*04 | Human Heavy Chain Constant | gcctccaccaagggcccatcggtcttccccctggcaccctcctccaagagcacctctgggggcacagcgg |
| | IgG1 | | Region (IGHG1*04) Nucleotide | ccctgggctgcctggtcaaggactacttccccgaaccggtgacggtgtcgtggaactcaggcgccctgac |
| | constant | | Sequence | cagcggcgtgcacaccttcccggctgtcctacagtcctcaggactctactccctcagcagcgtggtgaccg |
| | region | | | tgccctccagcagcttgggcacccagacctacatctgcaacgtgaatcacaagcccagcaacaccaagg |
| | | | | tggacaagaaagttgagcccaaatcttgtgacaaaactcacacatgcccaccgtgcccagcacctgaact |
| | | | | cctggggggaccgtcagtcttcctcttccccccaaaacccaaggacaccctcatgatctcccggacccctg |
| | | | | aggtcacatgcgtggtggtggacgtgagccacgaagaccctgaggtcaagttcaactggtacgtggacg |
| | | | | gcgtggaggtgcataatgccaagacaaagccgcgggaggagcagtacaacagcacgtaccgtgtggt |
| | | | | cagcgtcctcaccgtcctgcaccaggactggctgaatggcaaggagtacaagtgcaaggtctccaacaa |
| | | | | agccctcccagcccccatcgagaaaaccatctccaaagccaaagggcagccccgagaaccacaggtgt |
| | | | | acaccctgcccccatcccgggatgagctgaccaagaaccaggtcagcctgacctgcctggtcaaaggctt |
| | | | | ctatcccagcgacatcgccgtggagtgggagagcaatgggcagccggagaacaactacaagaccacg |
| | | | | cctcccgtgctggactccgacggctccttcttcctctacagcaagctcaccgtggacaagagcaggtggca |
| | | | | gcaggggaacatcttctcatgctccgtgatgcatgaggctctgcacaaccactacacgcagaagagcctc |
| | | | | tccctgtctccgggtaaa |
| 526 | | | Human Heavy Chain Constant | ASTKGPSVFPLAPSSKSTSGGTAALGCLVKDYFPEPVTVSWNSGALTSGVHTFPAVL |
| | | | Region (IGHG1*04) Protein | QSSGLYSLSSVVTVPSSSLGTQTYICNVNHKPSNTKVDKINEPKSCDKTHTCPPCP |
| | | | Sequence | APELLGGPSVFLFPPKPKDTLMISRTPEVTCVVVDVSHEDPEVKFNWYVDGVEVHN |
| | | | | AKTKPREEQYNSTYRVVSVLTVLHQDWLNGKEYKCKVSNKALPAPIEKTISKAKGQ |
| | | | | PREPQVYTLPPSRDELTKNQVSLTCLVKGFYPSDIAVEWESNGQPENNYKTIPPVL |
| | | | | DSDGSFFLYSKLTVDKSRWQQGNIFSCSVMHEALHNHYTQKSLSLSPGK |
| 527 | Human | IGHG2*01 | Human Heavy Chain Constant | gcctccaccaagggcccatcggtcttccccctggcgccctgctccaggagcacctccgagagcacagccg |
| | IgG2 | & | Region (IGHG2*01) Nucleotide | ccctgggctgcctggtcaaggactacttccccgaaccggtgacggtgtcgtggaactcaggcgctctgac |
| | constant | IGHG2*03 | Sequence | cagcggcgtgcacaccttcccagctgtcctacagtcctcaggactctactccctcagcagcgtggtgaccg |
| | region | & | | tgccctccagcaacttcggcacccagacctacacctgcaacgtagatcacaagcccagcaacaccaagg |
| | | IGHG2*05 | | tggacaagacagttgagcgcaaatgttgtgtcgagtgcccaccgtgcccagcaccacctgtggcaggac |
| | | | | cgtcagtcttcctcttccccccaaaacccaaggacaccctcatgatctcccggacccctgaggtcacgtgcg |
| | | | | tggtggtggacgtgagccacgaagaccccgaggtccagttcaactggtacgtggacggcgtggaggtg |
| | | | | cataatgccaagacaaagccacgggaggagcagttcaacagcacgttccgtgtggtcagcgtcctcacc |
| | | | | gttgtgcaccaggactggctgaacggcaaggagtacaagtgcaaggtctccaacaaaggcctcccagc |
| | | | | ccccatcgagaaaaccatctccaaaaccaaagggcagccccgagaaccacaggtgtacaccctgcccc |
| | | | | catcccgggaggagatgaccaagaaccaggtcagcctgacctgcctggtcaaaggcttctaccccagcg |
| | | | | acatcgccgtggagtgggagagcaatgggcagccggagaacaactacaagaccacacctcccatgctg |
| | | | | gactccgacggctccttcttcctctacagcaagctcaccgtggacaagagcaggtggcagcaggggaac |
| | | | | gtcttctcatgctccgtgatgcatgaggctctgcacaaccactacacgcagaagagcctctccctgtctccg |
| | | | | ggtaaa |
| 528 | | | Human Heavy Chain Constant | ASTKGPSVFPLAPCSRSTSESTAALGCLVKDYFPEPVTVSWNSGALTSGVHTFPAVL |
| | | | Region (IGHG2*01) Protein | QSSGLYSLSSVVTVPSSNFGTQTYTCNVDHKPSNTKVDKTVERKCCVECPPCPAPP |
| | | | Sequence | VAGPSVFLEPPKPKDILMISRTPEVTCVVVDVSHEDPEVQFNWYVDGVEVHNAKTK |
| | | | | PREEQFNSTFRVVSVLTVVHQDWLNGKEYKCINSNKGLPAPIEKTISKTKGQPREP |
| | | | | QVYTLPPSREEMTKNQVSLTCLVKGFYPSDIAVEWESNGQPENNYKTTPPMLDSD |
| | | | | GSFFLYSKLTVDKSRWQQGNVFSCSVMHEALHNHYTQKSLSLSPGK |
| 529 | Human | IGHG2*02 | Human Heavy Chain Constant | GCCTCCACCAAGGGCCCATCGGTCTTCCCCCTGGCGCCCTGCTCCAGGAGCACC |
| | IgG2 | | Region (IGHG2*02) Nucleotide | TCCGAGAGCACAGCGGCCCTGGGCTGCCTGGTCAAGGACTACTTCCCCGAACCG |
| | constant | | Sequence | GTGACGGTGTCGTGGAACTCAGGCGCTCTGACCAGCGGCGTGCACACCTTCCCG |
| | region | | | GCTGTCCTACAGTCCTCAGGACTCTACTCCCTCAGCAGCGTGGTGACCGTGACC |
| | | | | TCCAGCAACTTCGGCACCCAGACCTACACCTGCAACGTAGATCACAAGCCCAGCA |
| | | | | ACACCAAGGTGGACAAGACAGTTGAGCGCAAATGTTGTGTCGAGTGCCCACCGT |
| | | | | GCCCAGCACCACCTGTGGCAGGACCGTCAGTCTTCCTCTTCCCCCCAAAACCCAA |
| | | | | GGACACCCTCATGATCTCCCGGACCCCTGAGGTCACGTGCGTGGTGGTGGACGT |
| | | | | GAGCCACGAAGACCCCGAGGTCCAGTTCAACTGGTACGTGGACGGCATGGAGG |
| | | | | TGCATAATGCCAAGACAAAGCCACGGGAGGAGCAGTTCAACAGCACGTTCCGTG |
| | | | | TGGTCAGCGTCCTCACCGTCGTGCACCAGGACTGGCTGAACGGCAAGGAGTACA |
| | | | | AGTGCAAGGTCTCCAACAAAGGCCTCCCAGCCCCCATCGAGAAAACCATCTCCAA |
| | | | | AACCAAAGGGCAGCCCCGAGAACCACAGGTGTACACCCTGCCCCCATCCCGGGA |
| | | | | GGAGATGACCAAGAACCAGGTCAGCCTGACCTGCCTGGTCAAAGGCTTCTACCC |
| | | | | CAGCGACATCGCCGTGGAGTGGGAGAGCAATGGGCAGCCGGAGAACAACTACA |
| | | | | AGACCACACCTCCCATGCTGGACTCCGACGGCTCCTTCTTCCTCTACAGCAAGCT |
| | | | | CACCGTGGACAAGAGCAGGTGGCAGCAGGGGAACGTCTTCTCATGCTCCGTGAT |
| | | | | GCATGAGGCTCTGCACAACCACTACACACAGAAGAGCCTCTCCCTGTCTCCGGG |
| | | | | TAAA |
| 530 | | | Human Heavy Chain Constant | ASTKGPSVFPLAPCSRSTSESTAALGCLVKDYFPEPVTVSWNSGALTSGVHTFPAVL |
| | | | Region (IGHG2*02) Protein | QSSGLYSLSSVVTVTSSNFGTQTYTCNVDHKPSNTKVDKTVERKCCVECPPCPAPP |
| | | | Sequence | VAGPSVFLFPPKPKDTLMISRTPEVTCVVVDVSHEDPEVQFNWYVDGMEVHNAKT |
| | | | | KPREEQFNSTFRVVSVLTVVHQDWLNGKEYKCKVSNKGLPAPIEKTISKTKGQPRE |
| | | | | PQVYTLPPSREEMTKNQVSLTCLVKGFYPSDIAVEWESNGQPENNYKTTPPMLDS |
| | | | | DGSFFLYSKLTVDKSRWQQGNVFSCSVMHEALHNHYTQKSLSLSPGK |
| 531 | Human | IGHG2*04 | Human Heavy Chain Constant | gcctccaccaagggcccatcggtcttccccctggcgccctgctccaggagcacctccgagagcacagcg |
| | IgG2 | | Region (IGHG2*04) Nucleotide | gccctgggctgcctggtcaaggactacttccccgaaccggtgacggtgtcgtggaactcaggcgctctga |
| | constant | | Sequence | ccagcggcgtgcacaccttcccagctgtcctacagtcctcaggactctactccctcagcagcgtggtgacc |
| | region | | | gtgccctccagcagcttgggcacccagacctacacctgcaacgtagatcacaagcccagcaacaccaag |
| | | | | gtggacaagacagttgagcgcaaatgttgtgtcgagtgcccaccgtgcccagcaccacctgtggcagga |
| | | | | ccgtcagtcttcctcttccccccaaaacccaaggacaccctcatgatctcccggacccctgaggtcacgtgc |
| | | | | gtggtggtggacgtgagccacgaagaccccgaggtccagttcaactggtacgtggacggcgtggaggt |
| | | | | gcataatgccaagacaaagccacgggaggagcagttcaacagcacgttccgtgtggtcagcgtcctcac |
| | | | | cgttgtgcaccaggactggctgaacggcaaggagtacaagtgcaaggtctccaacaaaggcctcccag |
| | | | | cccccatcgagaaaaccatctccaaaaccaaagggcagccccgagaaccacaggtgtacaccctgccc |
| | | | | ccatcccgggaggagatgaccaagaaccaggtcagcctgacctgcctggtcaaaggcttctaccccagc |
| | | | | gacatcgccgtggagtgggagagcaatgggcagccggagaacaactacaagaccacacctcccatgct |
| | | | | ggactccgacggctccttcttcctctacagcaagctcaccgtggacaagagcaggtggcagcaggggaa |
| | | | | cgtcttctcatgctccgtgatgcatgaggctctgcacaaccactacacgcagaagagcctctccctgtctcc |
| | | | | gggtaaa |
| 532 | | | Human Heavy Chain Constant | ASTKGPSVFPLAPCSRSTSESTAALGCLVKDYFPEPVTVSWNSGALTSGVHTFPAVL |
| | | | Region (IGHG2*04) Protein | QSSGLYSLSSVVTVPSSSLGTQTYTCNVDHKPSNTKVDKTVERKCCVECPPCPAPP |
| | | | Sequence | VAGPSVFLFPPKPKDTLMISRTPEVTCVVVDVSHEDPEVQFNWYVDGVEVHNAKTK |
| | | | | PREEQFNSTFRWSVLTVVHQDWLNGKEYKCKVSNKGLPAPIEKTISKTKGQPREP |
| | | | | QVYTLPPSREEMTKNQVSLTCLVKGFYPSDIAVEWESNGQPENNYKTTPPMLDSD |
| | | | | GSFFLYSKLTVDKSRWQQGNVFSCSVMHEALHNHYTQKSLSLSPGK |
| 533 | Human | IGHG2*06 | Human Heavy Chain Constant | GCCTCCACCAAGGGCCCATCGGTCTTCCCCCTGGCGCCCTGCTCCAGGAGCACC |
| | IgG2 | | Region (IGHG2*06) Nucleotide | TCCGAGAGCACAGCGGCCCTGGGCTGCCTGGTCAAGGACTACTTCCCCGAACCG |
| | constant | | Sequence | GTGACGGTGTCGTGGAACTCAGGCGCTCTGACCAGCGGCGTGCACACCTTCCCG |
| | region | | | GCTGTCCTACAGTCCTCAGGACTCTACTCCCTCAGCAGCGTGGTGACCGTGCCC |
| | | | | TCCAGCAACTTCGGCACCCAGACCTACACCTGCAACGTAGATCACAAGCCCAGCA |
| | | | | ACACCAAGGTGGACAAGACAGTTGAGCGCAAATGTTGTGTCGAGTGCCCACCGT |
| | | | | GCCCAGCACCACCTGTGGCAGGACCGTCAGTCTTCCTCTTCCCCCCAAAACCCAA |
| | | | | GGACACCCTCATGATCTCCCGGACCCCTGAGGTCACGTGCGTGGTGGTGGACGT |
| | | | | GAGCCACGAAGACCCCGAGGTCCAGTTCAACTGGTACGTGGACGGCGTGGAGG |
| | | | | TGCATAATGCCAAGACAAAGCCACGGGAGGAGCAGTTCAACAGCACGTTCCGTG |
| | | | | TGGTCAGCGTCCTCACCGTCGTGCACCAGGACTGGCTGAACGGCAAGGAGTACA |
| | | | | AGTGCAAGGTCTCCAACAAAGGCCTCCCAGCCCCCATCGAGAAAACCATCTCCAA |
| | | | | AACCAAAGGGCAGCCCCGAGAACCACAGGTGTACACCCTGCCCCCATCCCGGGA |
| | | | | GGAGATGACCAAGAACCAGGTCAGCCTGACCTGCCTGGTCAAAGGCTTCTACCC |
| | | | | CAGCGACATCTCCGTGGAGTGGGAGAGCAATGGGCAGCCGGAGAACAACTACAA |
| | | | | GACCACACCTCCCATGCTGGACTCCGACGGCTCCTTCTTCCTCTACAGCAAGCTC |
| | | | | ACCGTGGACAAGAGCAGGTGGCAGCAGGGGAACGTCTTCTCATGCTCCGTGATG |
| | | | | CATGAGGCTCTGCACAACCACTACACACAGAAGAGCCTCTCCCTGTCTCCGGGT |
| | | | | AAA |
| 534 | | | Human Heavy Chain Constant | ASTKGPSVFPLAPCSRSTSESTAALGCLVKDYFPEPVTVSWNSGALTSGVHTFPAVL |
| | | | Region (IGHG2*06) Protein | QSSGLYSLSSVVTVPSSNFGTQTYTCNVDHKPSNTKVDKTVERKCCVECPPCPAPP |
| | | | Sequence | VAGPSVFLFPPKPKDILMISRTPEVTCVVVDVSHEDPEVQFNWYVDGVEVHNAKTK |
| | | | | PREEQFNSTFRVVSVLTVVHQDWLNGKEYKCKVSNKGLPAPIEKTISKTKGQPREP |
| | | | | QVYTLPPSREEMTKNQVSLICLVKGFYPSDISVEWESNGQPENNYKTTPPMLDSD |
| | | | | GSFFLYSKLIVDKSRWQQGNVFSCSVMHEALHNHYTQKSLSLSPGK |
| 535 | Human Cλ | IGLC7*03 | Cλ Light Chain Constant Region | GGTCAGCCCAAGGCTGCCCCCTCGGTCACTCTGTTCCCACCCTCCTCTGAGGAG |
| | constant | | (IGLC7*03) Nucleotide Sequence | CTTCAAGCCAACAAGGCCACACTGGTGTGICTCGTAAGTGACTICAACCCGGGA |
| | region | | | GCCGTGACAGTGGCCTGGAAGGCAGATGGCAGCCCCGTCAAGGTGGGAGTGGA |
| | | | | GACCACCAAACCCTCCAAACAAAGCAACAACAAGTATGCGGCCAGCAGCTACCT |
| | | | | GAGCCTGACGCCCGAGCAGTGGAAGTCCCACAGAAGCTACAGCTGCCGGGTCAC |
| | | | | GCATGAAGGGAGCACCGTGGAGAAGACAGTGGCCCCTGCAGAATGCTCT |
| 536 | | | Cλ Light Chain Constant Region | GQPKAAPSVTLFPPSSEELQANKATLVCLVSDFNPGAVTVAWKADGSPVKVGVETT |
| | | | (IGLC7*03) Amino Acid | KPSKQSNNKYAASSYLSLTPEQWKSHRSYSCRVTHEGSTVEKTVAPAECS |
| | | | Sequence | |
| 537 | Human | IGHG1*01 | WT human IgG1 nucleotide | gcctccaccaagggcccatcggtcttccccctggcaccctcctccaagagcacctctgggggcacagcgg |
| | WT IgG1 | & | sequence #2 | ccctgggctgcctggtcaaggactacttccccgaaccggtgacggtgtcgtggaactcaggcgccctgac |
| | constant | IGHG1*05 | | cagcggcgtgcacaccttcccggctgtcctacagtcctcaggactctactccctcagcagcgtggtgaccg |
| | region | (IgG1) | | tgccctccagcagcttgggcacccagacctacatctgcaacgtgaatcacaagcccagcaacaccaagg |
| | | | | tggacaagaaagttgagcccaaatcttgtgacaaaactcacacatgcccaccgtgcccagcacctgaact |
| | | | | cctggggggaccgtcagtcttcctcttccccccaaaacccaaggacaccctcatgatctcccggacccctg |
| | | | | aggtcacatgcgtggtggtggacgtgagccacgaagaccctgaggtcaagttcaactggtacgtggacg |
| | | | | gcgtggaggtgcataatgccaagacaaagccgcgggaggagcagtacaacagcacgtaccgggtggt |
| | | | | cagcgtcctcaccgtcctgcaccaggactggctgaatggcaaggagtacaagtgcaaggtctccaacaa |
| | | | | agccctcccagcccccatcgagaaaaccatctccaaagccaaagggcagccccgagaaccacaggtgt |
| | | | | acaccctgcccccatcccgggatgagctgaccaagaaccaggtcagcctgacctgcctggtcaaaggctt |
| | | | | ctatcccagcgacatcgccgtggagtgggagagcaatgggcagccggagaacaactacaagaccacg |
| | | | | cctcccgtgctggactccgacggctccttcttcctctacagcaagctcaccgtggacaagagcaggtggca |
| | | | | gcaggggaacgtcttctcatgctccgtgatgcatgaggctctgcacaaccactacacgcagaagagcctc |
| | | | | tccctgtctccgggtaaa |
| 538 | Human Cλ | IGLC2*01 | Cλ Light Chain Constant Region | GQPKAAPSVTLFPPSSEELQANKATLVCLISDFYPGAVTVAWKADSSPVKAGVETTT |
| | constant | | Amino Acid Sequence #2- | PSKQSNNKYAASSYLSLTPEQWKSHRSYSCQVTHEGSTVEKTVAPTECS |
| | region | | Encoded by nucleotide sequence | |
| | | | version A & B | |

| | | | |
|---|---|---|---|
| 539 | Human TIGIT-His/Flag | NCBI accession number | MGWSCIILFLVATATGVHSMMTGTIETTGNISAEKGGSTILQCHLSSTTAQV |
| | | NM_173799.3 | TQVNWEQQDQLLAICNADLGWHISPSFKDRVAPGPGLGLTLQSLTVND |
| | | Uniprot accession number | TGEYFCIYHTYPDGTYTGRIFLEVLESSVAEHGARFQIPIEGRDYKDDDDKH |
| | | Q495A1-1 | HHHHH |
| | | Expressed protein corresponds | |
| | | to ECD only: Met 22-Pro 141 as | |
| | | per full length sequence | |
| | | Protein domains annotated: | |
| | | Campath leader (double line), | |
| | | extracellular domain (bold), | |
| | | linker & Flag/His tag (italic) | |
| 540 | Human TIGIT | Human TIGIT amino acid | MRWCLLIWAQGLRQAPLASGMMTGTIETTGNISAEKGGSTILQCHLSSTTA |
| | | sequence | QVTQVNWEQQDQLLAICNADLGWHISPSFKDRVAPGPGLGLTLQSLTV |
| | | NCBI accession number: | NDTGEYFCIYHTYPDGTYTGRIFLEVLESSVAEHGARFQIPLLGAMAATLVV |
| | | NM_173799.3 | ICTAVIVVVALTRKKKALRIHSVEGDLRRKSAGQEEWSPSAPSPPGSCVQAEAAPAG |
| | | Uniprot accession number: | LCGEQRGEDCAELHDYFNVLSYRSLGNCSFFTETG |
| | | Q495A1-1 | |
| | | Protein domains annotated as | |
| | | follows: Signal peptide (double | |
| | | line), extracellular domain | |
| | | (bold), transmembrane domain | |
| | | (italic) and cytoplasmatic | |
| | | domain (underlined) | |
| 541 | Human TIGIT | Nucleotide sequence encoding | CGTCCTATCTGCAGTCGGCTACTTTCAGTGGCAGAAGAGGCCACATCTGCTTCC |
| | | human TIGIT | TGTAGGCCCTCTGGGCAGAAGCATGCGCTGGTGTCTCCTCCTGATCTGGGCCCA |
| | | NCBI accession number: | GGGGCTGAGGCAGGCTCCCCTCGCCTCAGGAATGATGACAGGCACAATAGAAAC |
| | | NM_173799.3 | AACGGGGAACATTTCTGCAGAGAAAGGTGGCTCTATCATCTTACAATGTCACCT |
| | | | CTCCTCCACCACGGCACAAGTGACCCAGGTCAACTGGGAGCAGCAGGACCAGCT |
| | | | TCTGGCCATTTGTAATGCTGACTTGGGGTGGCACATCTCCCCATCCTTCAAGGA |
| | | | TCGAGTGGCCCCAGGTCCCGGCCTGGGCCTCACCCTCCAGTCGCTGACCGTGAA |
| | | | CGATACAGGGGAGTACTTCTGCATCTATCACACCTACCCTGATGGGACGTACAC |
| | | | TGGGAGAATCTTCCTGGAGGTCCTAGAAAGCTCAGTGGCTGAGCACGGTGCCAG |
| | | | GTTCCAGATTCCATTGCTTGGAGCCATGGCCGCGACGCTGGTGGTCATCTGCAC |
| | | | AGCAGTCATCGTGGTGGTCGCGTTGACTAGAAAGAAGAAAGCCCTCAGAATCCA |
| | | | TTCTGTGGAAGGTGACCTCAGGAGAAAATCAGCTGGACAGGAGGAATGGAGCC |
| | | | CCAGTGCTCCCTCACCCCCAGGAAGCTGTGTCCAGGCAGAAGCTGCACCTGCTG |
| | | | GGCTCTGTGGAGAGCAGCGGGGAGAGGACTGTGCCGAGCTGCATGACTACTTC |
| | | | AATGTCCTGAGTTACAGAAGCCTGGGTAACTGCAGCTTCTTCACAGAGACTGGT |
| | | | TAGCAACCAGAGGCATCTTCTGGAAGATACACTTTTGTCTTTGCTATTATAGATG |
| | | | AATATATAAGCAGCTGTACTCTCCATCAGTGCTGCGTGTGTGTGTGTGTGTGTA |
| | | | TGTGTGTGTGTGTTCAGTTGAGTGAATAAATGTCATCCTCTTCTCCATCTTCATT |
| | | | TCCTTGGCCTTTTCGTTCTATTCCATTTTGCATTATGGCAGGCCTAGGGTGAGT |
| | | | AACGTGGATCTTGATCATAAATGCAAAATTAAAAAATATCTTGACCTGGTTTTAA |
| | | | ATCTGGCAGTTTGAGCAGATCCTATGTCTCTGAGAGACACATTCCTCATAATGG |
| | | | CCAGCATTTTGGGCTACAAGGTTTTGTGGTTGATGATGAGGATGGCATGACTGC |
| | | | AGAGCCATCCTCATCTCATTTTTTCACGTCATTTTCAGTAACTTTCACTCATTCAA |
| | | | AGGCAGGTTATAAGTAAGTCCTGGTAGCAGCCTCTATGGGGAGATTTGAGAGTG |
| | | | ACTAAATCTTGGTATCTGCCCTCAAGAACTTACAGTTAAATGGGGAGACAATGTT |
| | | | GTCATGAAAAGGTATTATAGTAAGGAGAGAAGGAGACATACACAGGCCTTCAGG |
| | | | AAGAGACGACAGTTTGGGGTGAGGTAGTTGGCATAGGCTTATCTGTGATGAAGT |
| | | | GGCCTGGGAGCACCAAGGGGATGTTGAGGCTAGTCTGGGAGGAGCAGGAGTTT |
| | | | TGTCTAGGGAACTTGTAGGAAATTCTTGGAGCTGAAAGTCCCACAAAGAAGGCC |
| | | | CTGGCACCAAGGGAGTCAGCAAACTTCAGATTTTATTCTCTGGGCAGGCATTTC |
| | | | AAGTTTCCTTTTGCTGTGACATACTCATCCATTAGACAGCCTGATACAGGCCTGT |
| | | | AGCCTCTTCCGGCCGTGTGTGCTGGGGAAGCCCCAGGAAACGCACATGCCCACA |
| | | | CAGGGAGCCAAGTCGTAGCATTTGGGCCTTGATCTACCTTTTCTGCATCAATAC |
| | | | ACTCTTGAGCCTTTGAAAAAAGAACGTTTCCCACTAAAAAGAAAATGTGGATTTT |
| | | | TAAAATAGGGACTCTTCCTAGGGGAAAAAGGGGGGCTGGGAGTGATAGAGGGT |
| | | | TTAAAAAATAAACACCTTCAAACTAACTTTCTTCGAACCCTTTTATTCACTCCCTGA |
| | | | CGACTTTGTGCTGGGGTTGGGGTAACTGAACCGCTTATTTCTGTTTAATTGCAT |
| | | | TCAGGCTGGATCTTTAGAAGACTTTTATCCTTCCACCATCTCTCTCAGAGGAATGA |
| | | | GCGGGGAGGTTGGATTTACTGGTGACTGATTTTCTTTCATGGGCCAAGGAACTG |
| | | | AAAGAGAATGTGAAGCAAGGTTGTGTCTTGCGCATGGTTAAAAATAAAGCATTG |
| | | | TCCTGCTTCCTAAGACTTAGACTGGGGTTGACAATTGTTTTAGCAACAAGACAAT |
| | | | TCAACTATTTCTCCTAGGATTTTTATTATTATTATTTTTTCACTTTTCTACCAAAT |
| | | | GGGTTACATAGGAAGAATGAACTGAAATCTGTCCAGAGCTCCAAGTCCTTTGGA |
| | | | AGAAAGATTAGATGAACGTAAAAATGTTGTTGTTTGCTGTGGCAGTTTACAGCA |
| | | | TTTTTCTTGCAAAATTAGTGCAAATCTGTTGGAAATAGAACACAATTCACAAATT |
| | | | GGAAGTGAACTAAAATGTAATGACGAAAAGGGAGTAGTGTTTTGATTTGGAGGA |
| | | | GGTGTATATTCGGCAGAGGTTGGACTGAGAGTTGGGTGTTATTTAACATAATTA |
| | | | TGGTAATTGGGAAACATTTATAAACACTATTGGGATGGTGATAAAATACAAAAG |
| | | | GGCCTATAGATGTTAGAAATGGGTCAGGTTACTGAAATGGGATTCAATTTGAAA |
| | | | AAAATTTTTTTAAATAGAACTCACTGAACTAGATTCTCCTCTGAGAACCAGAGAA |
| | | | GACCATTTCATAGTTGGATTCCTGGAGACATGCGCTATCCACCACGTAGCCACTT |
| | | | TCCACATGTGGCCATCAACCACTTAAGATGGGGTTAGTTTAAATCAAGATGTGC |
| | | | TGTTATAATTGGTATAAGCATAAAATCACACTAGATTCTGGAGATTTAATATGAA |
| | | | TAATAAGAATACTATTTCAGTAGTTTTGGTATATTGTGTGTCAAAAATGATAATA |
| | | | TTTTGGATGTATTGGGTGAAATAAAATATTAACATTAAAAAAAAAAA |
| 542 | Human TIGIT | Human TIGIT optimised | ATGGGCTGGTCCTGCATCATCCTGTTTCTGGTGGCCACAGCCACCGGCGTGCAC |
| | | nucleotide sequence encoding | AGCATGATGACCGGCACCATCGAGACAACCGGCAACATCAGCGCCGAGAAGGGC |
| | | human TIGIT extra cellular | GGCTCTATCATCCTGCAGTGCCACCTGAGCAGCACCACCGCCCAAGTGACCCAA |
| | | domain. Annotated as follows: | GTGAACTGGGAGCAGCAGGATCAGCTGCTGGCCATCTGCAACGCCGATCTGGG |
| | | Campath leader (double line) | CTGGCACATCAGCCCCAGCTTCAAGGACAGAGTGGCCCCTGGACCTGGCCTGGG |
| | | NCBI accession number: | ACTGACACTGCAGAGCCTGACCGTGAACGATACCGGCGAGTACTTCTGCATCTA |
| | | NM_173799.3 | CCACACCTACCCCGACGGCACCTATACCGGCCGGATCTTCCTGGAAGTGCTGGA |
| | | | AAGCAGCGTGGCCGAGCACGGCGCCAGATTCCAGATCCCT |
| 543 | Human TIGIT | Human TIGIT optimised | ATGAGGTGGTGTCTGCTGCTGATCTGGGCTCAGGGCCTGAGACAGGCCCCTCT |
| | | nucleotide sequence encoding | GGCTAGCGGAATGATGACCGGCACCATCGAGACAACCGGCAACATCAGCGCCGA |
| | | human TIGIT full length | GAAGGGCGGCAGCATCATCCTGCAGTGTCACCTGAGCAGCACCACCGCACAAGT |
| | | NCBI accession number: | GACCCAAGTGAACTGGGAGCAGCAGGACCAGCTGCTGGCCATCTGTAACGCTGA |
| | | NM_173799.3 | CCTGGGCTGGCACATCAGCCCCAGCTTCAAGGACAGAGTGGCTCCTGGCCCTGG |
| | | | CCTGGGACTGACTCTGCAGTCTCTGACCGTGAACGATACCGGCGAGTACTTCTG |
| | | | CATCTACCACACCTACCCCGACGGCACCTATACCGGCAGAATCTTCCTGGAAGTG |
| | | | CTGGAAAGCAGCGTGGCCGAGCACGGCGCCAGATTCCAGATTCCTCTGCTGGGC |
| | | | GCCATGGCCGCCACACTGGTCGTGATCTGTACCGCCGTGATCGTGGTGGTGGCC |
| | | | CTGACCAGAAAGAAGAAGGCCCTGCGGATCCACAGCGTGGAAGGCGACCTGAG |
| | | | AAGAAAGTCTGCCGGCCAGGAAGAGTGGTCCCCTAGCGCTCCAAGCCCTCCTGG |
| | | | CTCTTGTGTGCAGGCTGAGGCTGCTCCTGCTGGCCTGTGTGGCGAACAGAGAG |
| | | | GCGAGGATTGCGCCGAGCTGCACGACTACTTCAACGTGCTGAGCTACAGAAGCC |
| | | | TGGGCAACTGCAGCTTCTTCACCGAGACAGGC |
| 544 | Human TIGIT | Human TIGIT (alternative | MRWCLLLIWAGLRAPLASGMMTGTIETTGNISAEKGGSIILQCHLSSTTA |
| | | isoform) amino acid sequence | QVTQVNWEQQDQLLAICNADLGWHISPSFKDRVAPGPGLGLTLQSLTV |
| | | Uniprot accession number: | NDTGEYFCIYHTYPDGMGRIFLEVLESSVAEHGARFQIPLLGAMAATLW |
| | | Q495A1-2 | ICTAVIVVVALTRKFVCF |
| | | Differs from Seq ID No: 540 | |
| | | 167-170: KKAL → FVCF | |
| | | 171-244: Missing. | |
| | | Protein domains annotated as | |
| | | follows: Signal peptide (double | |
| | | line), extracellular domain | |
| | | (bold), transmembrane domain | |
| | | (italic) and cytoplasmatic | |
| | | domain (underlined) | |
| 545 | Human TIGIT-Fc | Human TIGIT-Fc amino acid | MGWSCIILFLVATATGVHSMMTGTIETTGNISAEKGGSIILQCHLSSTTAQV |
| | | sequence | TQVNWEQQDQLLAICNADLGWHISPSFKDRVAPGPGLGLTLQSLTVND |
| | | NCBI accession number: | TGEYFCIYHTYPDGTYTGRIFLEVLESSVAEHGARFQIPIEGREPKSCDKTH |
| | | NM_173799.3 | TCPPCPAPELLGGPSVFLFPPKPKDTLMISRTPEVTCVVVDVSHEDPEVKFNWYVD |
| | | Uniprot accession number: | GVEVHNAKTKPREEQYNSTYRWSVLTVLHQDWLNGKEYKCKVSNKALPAPIEKTI |
| | | Q495A1-1 | SKAKGQPREPQVYTLPPSRDELTKNQVSLTCLVKGFYPSDIAVEWESNGQPENNYK |
| | | Protein domains annotated as | TTPPVLDSDGSFFLYSKLTVDKSRWQQGNVFSCSVMHEALHNHYTQKSLSLSPGK |
| | | follows: Campath leader (double | |
| | | line), extracellular domain (Met | |
| | | 22-Pro 141 as per full length | |
| | | sequence) (bold), linker and Fc | |
| | | (italic) | |
| 546 | Human TIGIT-Fc R&D, | Human TIGIT-Fc amino acid | MMTGTIETTGNISAEKGGSIILQCHLSSTTAQVTQVNWEQQDQLLAICN |
| | Catalogue number | sequence | ADLGWHISPSFKDRVAPGPGLGLTLQSLTVNDAGEYFCIYHTYPDGTYT |
| | 7898-TG | NCBI accession number: | GRIFLEVLESSVAEHGARFQIPIEGRMDPKSCDKTHTCPPCPAPELLGGPSVFLF |
| | | AAI01289 | PPKPKDTLMISRTPEVICVVVDVSHEDPEVKFNWYVDGVEVHNAKTKPREEQYNS |
| | | Extracellular domain (Met 22- | TYRWSVLTVLHQDWLNGKEYKCKVSNKALPAPIEKTISKAKGQPREPQVIPTLPPSR |
| | | Pro 141 as per full length | DELTKNQVSLTCLVKGFYPSDIAVEWESNGQPENNYKTTPPVLDSDGSFFLYSKLT |
| | | sequence) (bold), | VDKSRWQQGNVFSCSVMHEALHNHYTQKSLSLSPGK |
| | | linker and Human IgG1 Fc | |
| | | (Pro100Lys330) (italic) | |
| 547 | Cyno TIGIT | Cyno TIGIT amino acid | MRWCLFLIWAQGLRQAPLASGMMTGTIETTGNISAKKGGSVILQCHLSSTMAQVT |
| | | sequence | QVNWEQHDHSLLAIRNAELGWHIYPAFKDRVAPGPGLGLTLQSLTMNDTGEYFCT |
| | | NCBI accession number: | YHTYPDGTYRGRIFLEVLESSVAEHSARFQIPLLGAMAMMLVVICIAVIVVVVLARKK |
| | | Transcript variant X4 | SLRIHSVESGLQRKSTGQEEQIPSAPSPPGSCVQAEAAPAGLCGEQQGDDCAELHD |
| | | XP_005548160.1 | YFNVLSYRSLGSCSFFTETG |
| 548 | Cyno TIGIT | Nucleotide sequence encoding | CTCCTGCTGCAGGATGTTGCCCTTGTTCGAGGCAGAGACAGGAGGCCTCAGACA |
| | | cyno TIGIT | GCTGTGACAGCCCTGGAGCTCTCCTACCACATCTGAGCCAGAGGGAAGACTTTG |
| | | NCBI accession number: | GAGAAGCAGAAGCCCAAAGACACTGCTGGGAGATTGGTCTGTGCTCTGGGAGA |
| | | Transcript variant X4 | ACCCTAGGTTGTGTTTCCCGTGTACAAGTCACGGATCTTCTGGAAGGTACCACC |
| | | XM_005548103.1 | GCTCCCAGCCCCGCTTGGCTGAGGGCTGAGGGCCACAGGTTTTCGGGACTGTG |
| | | | CCTGTGGTTGGAGGCTGTGGACTCAAGCTCAGTTTTACCGTCCTATCTGCAGTC |
| | | | GGCTACTTTCGGTGGCAGAAGAGGCCACATCTGCTTCCTGTAAGCCCTCTGGGC |
| | | | AGAAGCATGCGGTGGTGTCTCTTCCTGATCTGGGCCCAGGGGCTGAGGCAGGC |
| | | | TCCCCTCGCCTCAGGAATGATGACAGGCACAATAGAAACAACGGGGAACATTTC |
| | | | TGCAAAGAAAGGTGGCTCTGTTARTTACAATGTCACCTCTCCTCCACCATGGCA |
| | | | CAAGTGACCCAGGTCAACTGGGAGCAGCATGACCATTCGCTTCTGGCCATTCGT |
| | | | AATGCTGAGTTGGGGTGGCACATCTACCCAGCCTTCAAGGATCGAGTGGCCCCG |
| | | | GGTCCTGGCCTGGGCCTCACCCTCCAGTCGCTGACCATGAATGATACAGGGGAG |
| | | | TACTTCTGCACCTATCACACCTACCCTGATGGGACTTACAGAGGGAGAATCTTCC |
| | | | TGGAGGTCCTAGAAAGCTCAGTGGCTGAGCACAGTGCCAGGTTCCAGATTCCAT |
| | | | TGCTTGGAGCCATGGCCATGATGCTGGTGGTCATCTGCATAGCAGTCATCGTGG |
| | | | TGGTCGTGTTGGCTAGAAAGAAATCCCTCAGAATCCATTCTGTGGAAAGTGGCC |
| | | | TCCAGAGAAAATCAACTGGACAGGAAGAACAGATTCCCAGTGCTCCCTCACCCC |
| | | | CAGGAAGCTGTGTCCAGGCAGAAGCTGCACCTGCTGGGCTCTGTGGAGAGCAG |
| | | | CAGGGAGATGACTGTGCCGAGCTGCATGACTACTTCAATGTCCTGAGTTACAGA |
| | | | AGCCTGGGGAGCTGCAGCTTCTTCACAGAGACTGGGTAGCAAACAGAGGCATGT |
| | | | TCTGGAAGATACACTTTTGTCTTGACTATTATAGATGTCTTGACTAATATATAAA |
| | | | CAGCTGTATTCGCCATCAGTGTGCGCGCGCGTGTGTGTTCAGTTGAGTGAATAA |
| | | | ATGTCATCCTCTTCTCTA |
| 549 | Cyno TIGIT | Cyno TIGIT amino acid | MRWCLFLIWAQGLRQAPLASGMMTGTETTGNISAKKGGSVILQCHLSSTMAQVT |
| | | sequence | QVNWEQHDHSLLAIRNAELGWHIYPAFKDRVAPGPGLGLTLQSLTMNDTGEYFCT |
| | | NCBI accession number: | YHTYPDGTYRGRIFLEVLESSVAEHSARFQIPLLGAMAMMLVVICIAVIVVVVLARKK |
| | | Transcript variants | KSLRIHSVESGLQRKSTGQEEQIPSAPSPPGSCVQAEAAPAGLCGEQQGDDCAELH |
| | | X1: XM_005548100.1 | DYFNVLSYRSLGSCSFFTETG |
| | | X2: XM_005548101.1 | |
| | | X3: XM_005548102.1 | |
| 550 | Cyno TIGIT | Nucleotide sequence encoding | CCTGCTGCAGGATGTTGCCCTTGTTCGAGGCAGAGACAGGAGGCCTCAGACAGC |
| | | cyno TIGIT | TGTGACAGCCCTGGAGCTCTCCTACCACATCTGAGCCAGAGGGAAGACTTTGGA |
| | | NCBI accession number: | GAAGCAGAAGCCCAAAGACACTGCTGGGAGATTGGTCTGTGCTCTGGGAGAACC |
| | | Transcript variant | CTAGGTTGTGTTTCCCGTGTACAAGTCACGGATCTTCTGGAAGGTACCACCGCT |
| | | X1: XM_005548100.1 | CCCAGCCCCGCTTGGCTGAGGGCTGAGGGCCACAGGTTTTCGGGACTGTGCCT |
| | | | GTGGTTGGAGGCTGTGGACTCAAGCTCAGTTTTACCGTCCTATCTGCAGTCGGC |
| | | | TACTTTCGGTGGCAGAAGAGGCCACATCTGCTTCCTGTAAGCCCTCTGGGCAGA |
| | | | AGCATGCGGTGGTGTCTCTTCCTGATCTGGGCCCAGGGGCTGAGGCAGGCTCC |
| | | | CCTCGCCTCAGGAATGATGACAGGCACAATAGAAACAACGGGGAACATTTCTGC |
| | | | AAAGAAAGGTGGCTCTGTTATCTTACAATGTCACCTCTCCTCCACCATGGCACAA |
| | | | GTGACCCAGGTCAACTGGGAGCAGCATGACCATTCGCTTCTGGCCATTCGTAAT |
| | | | GCTGAGTTGGGGTGGCACATCTACCCAGCCTTCAAGGATCGAGTGGCCCCGGGT |
| | | | CCTGGCCTGGGCCTCACCCTCCAGTCGCTGACCATGAATGATACAGGGGAGTAC |
| | | | TTCTGCACCTATCACACCTACCCTGATGGGACTTACAGAGGGAGAATCTTCCTG |
| | | | GAGGTCCTAGAAAGC |
| | | | TCAGTGGCTGAGCACAGTGCCAGGTTCCAGATTCCATTGCTTGGAGCCATGGCC |
| | | | ATGATGCTGGTGGTCATCTGCATAGCAGTCATCGTGGTGGTCGTGTTGGCTAGA |
| | | | AAGAAGAAATCCCTCAGAATCCATTCTGTGGAAAGTGGCCTCCAGAGAAAATCA |
| | | | ACTGGACAGGAAGAACAGATTCCCAGTGCTCCCTCACCCCCAGGAAGCTGTGTC |
| | | | CAGGCAGAAGCTGCACCTGCTGGGCTCTGTGGAGAGCAGCAGGGAGATGACTG |
| | | | TGCCGAGCTGCATGACTACTTCAATGTCCTGAGTTACAGAAGCCTGGGGAGCTG |
| | | | CAGCTTCTTCACAGAGACTGGGTAGCAAACAGAGGCATGTTCTGGAAGATACAC |
| | | | TTTTGTCTTGACTATTATAGATGTCTTGACTAATATATAAACAGCTGTATTCGCC |
| | | | ATCAGTGTGCGCGCGCGTGTGTGTTCAGTTGAGTGAATAAATGTCATCCTCTC |
| | | | TCTA |
| 551 | Cyno TIGIT | Nucleotide sequence encoding | CCTGCTGCAGGATGTTGCCCTTGTTCGAGGCAGAGACAGGAGGCCTCAGACAGC |
| | | cyno TIGIT | TGTGACAGCCCTGGAGCTCTCCTACCACATCTGAGCCAGAGGGAAGACTTTGGA |
| | | NCBI accession number: | GAAGCAGAAGCCCAAAGACACTGCTGGGAGATTGGTCTGTGCTCTGGGAGAACC |
| | | Transcript variant | CTAGGTTGTGTTTCCCGTGTACAAGTCACGGATCTTCTGGAAGGCTCAGTTTTA |
| | | X2: XM_005548101.1 | CCGTCCTATCTGCAGTCGGCTACTTTCGGTGGCAGAAGAGGCCACATCTGCTTC |
| | | | CTGTAAGCCCTCTGGGCAGAAGCATGCGGTGGTGTCTCTTCCTGATCTGGGCCC |
| | | | AGGGGCTGAGGCAGGCTCCCCTCGCCTCAGGAATGATGACAGGCACAATAGAAA |
| | | | CAACGGGGAACATTTCTGCAAAGAAAGGTGGCTCTGTTATCTTACAATGTCACC |
| | | | TCTCCTCCACCATGGCACAAGTGACCCAGGTCAACTGGGAGCAGCATGACCATT |
| | | | CGCTTCTGGCCATTCGTAATGCTGAGTTGGGGTGGCACATCTACCCAGCCTTCA |
| | | | AGGATCGAGTGGCCCCGGGTCCTGGCCTGGGCCTCACCCTCCAGTCGCTGACCA |
| | | | TGAATGATACAGGGGAGTACTTCTGCACCTATCACACCTACCCTGATGGGACTT |
| | | | ACAGAGGGAGAATCTTCCTGGAGGTCCTAGAAAGCTCAGTGGCTGAGCACAGTG |
| | | | CCAGGTTCCAGATTCCATTGCTTGGAGCCATGGCCATGATGCTGGTGGTCATCT |
| | | | GCATAGCAGTCATC |
| | | | GTGGTGGTCGTGTTGGCTAGAAAGAAGAAATCCCTCAGAATCCATTCTGTGGAA |
| | | | AGTGGCCTCCAGAGAAAATCAACTGGACAGGAAGAACAGATTCCCAGTGCTCCC |
| | | | TCACCCCCAGGAAGCTGTGTCCAGGCAGAAGCTGCACCTGCTGGGCTCTGTGGA |
| | | | GAGCAGCAGGGAGATGACTGTGCCGAGCTGCATGACTACTTCAATGTCCTGAGT |
| | | | TACAGAAGCCTGGGGAGCTGCAGCTTCTTCACAGAGACTGGGTAGCAAACAGAG |
| | | | GCATGTTCTGGAAGATACACTTTTGTCTTGACTATTATAGATGTCTTGACTAATA |
| | | | TATAAACAGCTGTATTCGCCATCAGTGTGCGCGCGCGTGTGTGTTCAGTTGAGT |
| | | | GAATAAATGTCATCCTCTTCTCTA |
| 552 | Cyno TIGIT | Nucleotide sequence encoding | TCCTGCTGCAGGATGTTGCCCTTGTTCGAGGCAGAGACAGGAGGCCTCAGACAG |
| | | cyno TIGIT | CTGTGACAGCCCTGGAGCTCTCCTACCACATCTGAGCCAGAGGGAAGACTTTGG |
| | | NCBI accession number: | AGAAGCAGAAGCCCAAAGACACTGCTGGGAGATTGGTCTGTGCTCTGGGAGAAC |
| | | Transcript variant | CCTAGGTTGTGTTTCCCGTGTACAAGTCACGGATCTTCTGGAAGGTACCACCGC |
| | | X3: XM_005548102.1 | TCCCAGCCCCGCTTGGCTGAGGGCTGAGGGCCACAGGTTTTCGGGACTGTGCCT |
| | | | GTGGTTGGAGGCTGTGGACTCAAGCTCAGTTTTACCGTCCTATCTGCAGTCGGC |
| | | | TACTTTCGGTGGCAGAAGAGGCCACATCTGCTTCCTGTAAGCCCTCTGGGCAGA |
| | | | AGCATGCGGTGGTGTCTCTTCCTGATCTGGGCCCAGGGGCTGAGGCAGGCTCC |
| | | | CCTCGCCTCAGGAATGATGACAGGCACAATAGAAACAACGGGGAACATTTCTGC |
| | | | AAAGAAAGGTGGCTCTGTTATCTTACAATGTCACCTCTCCTCCACCATGGCACAA |
| | | | GTGACCCAGGTCAACTGGGAGCAGCATGACCATTCGCTTCTGGCCATTCGTAAT |
| | | | GCTGAGTTGGGGTGGCACATCTACCCAGCCTTCAAGGATCGAGTGGCCCCGGGT |
| | | | CCTGGCCTGGGCCTCACCCTCCAGTCGCTGACCATGAATGATACAGGGGAGTAC |
| | | | TTCTGCACCTATCACACCTACCCTGATGGGACTTACAGAGGGAGAATCTTCCTG |
| | | | GAGGTCCTAGAAAG |
| | | | CTCAGTGGCTGAGCACAGTGCCAGGTTCCAGATTCCATTGCTTGGAGCCATGGC |
| | | | CATGATGCTGGTGGTCATCTGCATAGCAGTCATCGTGGTGGTCGTGTTGGCTAG |
| | | | AAAGAAGAAATCCCTCAGAATCCATTCTGTGGAAAGTGGCCTCCAGAGAAAATC |
| | | | AACTGGACAGGAAGAACAGATTCCCAGTGCTCCCTCACCCCCAGGAAGCTGTGT |
| | | | CCAGGCAGAAGCTGCACCTGCTGGGCTCTGTGGAGAGCAGCAGGGAGATGACT |
| | | | GTGCCGAGCTGCATGACTACTTCAATGTCCTGAGTTACAGAAGCCTGGGGAGCT |
| | | | GCAGCTTCTTCACAGAGACTGGGTAGCAAACAGAGAACTCACTGAACTAGATTC |
| | | | TCCTCTGAGGACCAGAGAAGACCATCTCATAGCTGGATTCCTGGAGACATGCAC |
| | | | TGTCCACGCGTAGCCACTTTCCACGTGTGGCCATCAACCACTTAAGATGGGGTT |
| | | | AGTTTAAATCAAGATGTG |
| 553 | Cyno TIGIT | Cyno TIGIT optimised nucleotide | ATGGGCTGGTCCTGCATCATCCTGCTTCTGGTGGCCACAGCCACCGGCGTGCAC |
| | | sequence for expression of Cyno | AGCATGATGACCGGCACCATCGAGACAACCGGCAACATCAGCGCCAAGAAAGGC |
| | | TIGIT extracellular domain | GGCAGCGTGATCCTGCAGTGCCACCTGTCTAGCACCATGGCCCAAGTGACCCAA |
| | | annotated as follows: Campath | GTGAACTGGGAGCAGCACGACCACAGCCTGCTGGCCATCAGAAATGCCGAGCTG |
| | | leader (double line) | GGCTGGCACATCTACCCCGCCTTCAAGGACAGAGTGGCCCCTGGACCTGGCCTG |
| | | | GGACTGACACTGCAGAGCCTGACCATGAACGATACCGGCGAGTACTTCTGCACC |
| | | | TACCACACCTACCCCGACGGCACCTACCGGGGCAGAATCTTCCTGGAAGTGCTG |
| | | | GAAAGCAGCGTGGCCGAGCACAGCGCCAGATTCCAGATCCCC |
| 554 | Cyno TIGIT-Flag/His | Cyno TIGIT-Flag/His amino | MGWSCIILFLVATATGVHSMMTGTIETTGNISAKKGGSVILQCHLSSTMAQVTQVN |
| | | acid sequence | WEQHDHSLLAIRNAELGWHIYPAFKDRVAPGPGLGLTLQSLTMNDTGEYFCTYHT |
| | | NCBI accesstion number: | YPDGTYRGRIFLEVLESSVAEHSARFQIPIEGRDYKDDDDKHHHHHH |
| | | XP_005548160.1 | |
| | | Protein domains annotated as | |
| | | follows: Campath leader (double | |
| | | line), extracellular domain (Met | |
| | | 22-Pro 142 as per full length | |
| | | sequence) (bold), linker and | |
| | | Flag/His tag (italics) | |
| 555 | Cyno TIGIT-Fc | Cyno TIGIT-amino acid | MGWSCIILFLVATATGVHSMMTGTIETTGNISAKKGGSVILQCHLSSTMAQVTQVN |
| | | sequence | WEQHDHSLLAIRNAELGWHIYPAFKDRVAPGPGLGLTLQSLTMNDTGEYFCTYHT |
| | | NCBI accession number: | YPDGTYRGRIFLEVLESSVAEHSARFQIPIEGREPKSCDKTHTCPPCPAPELLGGPSV |
| | | XP_005548160.1 | FLFPPKPKDTLMISRTPEVTCVVVDVSHEDPEVKFNWYVDGVEVHNAKTKPREEQY |
| | | Protein domains annotated as | NSTYRWSVLTVLHQDWLNGKEYKCKVSNKALPAPIEKTISKAKGQPREPQVYTLP |
| | | follows: Campath leader (double | PSRDELTKNQVSLTCLVKGFYPSDIAVEWESNGQPENNYKTTPPVLDSDGSFFLYS |
| | | line), extracellular domain | KLTVDKSRWQQGNVFSCSVMHEALHNHYTQKSLSLSPGK |
| | | (Met 22-Pro 142 as per full | |
| | | length sequence) (bold), linker | |
| | | and Fc (italics) | |
| 556 | Mouse TIGIT | Mouse TIGIT amino acid | MHGWLLLVWVQGLIQAAFLATGATAGTIDTKRNISAEEGGSVILQCHFSSDTAEVT |
| | | sequence | QVDWKQQDQLLAIYSVDLGWHVASVFSDRVVPGPSLGLTFQSLTMNDTGEYFCT |
| | | NCBI accession number: | YHTYPGGIYKGRIFLKVQESSVAQFQTAPLGGTMAAVLGLICLMVTGVTVLARKKSI |
| | | NP_001139797.1 | RMHSIESGLGRTEAEPQEWNLRSLSSPGSPVQTQTAPAGPCGEQAEDDYADPQEY |
| | | | FNVLSYRSLESFIAVSKTG |
| 557 | Mouse TIGIT | Nucleotide sequence encoding | GCCAGTTTCAGTTGGAGGAGAGGCCACATCCACTTTGCTGTAGGCCTCTGGTTA |
| | | mouse TIGIT | GAAGCATGCATGGCTGGCTGCTCCTGGTCTGGGTCCAGGGGCTGATACAGGCT |
| | | NCBI accession number: | GCCTTCCTCGCTACAGGAGCCACAGCAGGCACGATAGATACAAAGAGGAACATC |
| | | EU675311.1 | TCTGCAGAGGAAGGTGGCTCTGTCATCTTACAGTGTCACTTCTCCTCTGACACA |
| | | | GCTGAAGTGACCCAAGTCGACTGGAAGCAGCAGGACCAGCTTCTGGCCATTTAT |
| | | | AGTGTTGACCTGGGGTGGCATGTCGCTTCAGTCTTCAGTGATCGGGTGGTCCCA |
| | | | GGCCCCAGCCTAGGCCTCACCTTCCAGTCTCTGACAATGAATGACACGGGAGAG |
| | | | TACTTCTGTACCTATCATACGTATCCTGGTGGGATTTACAAGGGGAGAATATTCC |
| | | | TGAAGGTCCAAGAAAGCTCAGTGGCTCAGTTCCAGACTGCCCCGCTTGGAGGAA |
| | | | CCATGGCTGCTGTGCTGGGACTCATTTGCTTAATGGTCACAGGAGTGACTGTAC |
| | | | TGGCTAGAAAGAAGTCTATTAGAATGCATTCTATAGAAAGTGGCCTTGGGAGAA |
| | | | CAGAAGCGGAGCCACAGGAATGGAACCTGAGGAGTCTCTCATCCCCTGGAAGCC |
| | | | CTGTCCAGACACAAACTGCCCCTGCTGGTCCCTGTGGAGAGCAGGCAGAAGATG |
| | | | ACTATGCTGACCCACAGGAATACTTTAATGTCCTGAGCTACAGAAGCCTAGAGA |
| | | | GCTTCATTGCTGTATCGAAGACTGGCTAACGACAGCTCTCTATCCCTCTCCCTAT |
| | | | GTCTCTCTCTCTGTCTCTCTCTGTCTCTCTCTGTCTCTGTCTCTGTCTCTGTCTC |
| | | | TCTCTCTCTCTCTCTCTCTCTCTCTGTGTGTGTGTGTGTGTATGTGTGTATACAT |
| | | | CATTAATGTTCATTAACACTAACTGCATATGGTGGAGGACCAGGAAATAAAAGTT |
| | | | TGTGTTGCTAATAAAATTAAGTGCTAACTT |
| 558 | Mouse TIGIT | Mouse TIGIT optimised | ATGCACGGATGGCTGCTGCTCGTGTGGGTGCAGGGACTGATCCAGGCCGCTTT |
| | | nucleotide sequence | TCTGGCCACCGGCGCTACAGCCGGCACCATCGACACCAAGAGAAACATCAGCGC |
| | | NCBI accession number: | CGAAGAGGGCGGCAGCGTGATCCTGCAGTGTCACTTCAGCAGCGACACCGCCGA |
| | | EU675311.1 | AGTGACCCAGGTGGACTGGAAGCAGCAGGACCAGCTGCTGGCCATCTACAGCGT |
| | | | GGACCTGGGCTGGCATGTGGCCAGCGTGTTCAGCGACAGAGTGGTGCCTGGCC |
| | | | CTAGCCTGGGCCTGACATTCCAGAGCCTGACCATGAACGATACCGGCGAGTACT |
| | | | TCTGCACCTACCACACCTACCCTGGCGGCATCTACAAGGGCAGAATCTTCCTGAA |
| | | | GGTGCAGGAATCCAGCGTGGCCCAGTTCCAGACAGCTCCTCTGGGCGGCACAAT |
| | | | GGCCGCTGTGCTGGGGCTGATCTGCCTGATGGTCACCGGCGTGACAGTGCTGG |
| | | | CCCGGAAGAAATCCATCAGAATGCACAGCATCGAGTCCGGCCTGGGCAGAACAG |
| | | | AGGCCGAGCCTCAGGAATGGAACCTGAGAAGCCTGAGCAGCCCCGGCAGCCCT |
| | | | GTGCAGACACAGACAGCACCAGCTGGCCCTTGTGGCGAGCAGGCCGAGGATGA |
| | | | TTACGCCGACCCCCAGGAATACTTCAACGTGCTGAGCTACAGAAGCCTGGAATC |
| | | | CTTTATCGCCGTGTCCAAGACCGGC |
| 559 | Mouse TIGIT | Mouse TIGIT amino acid | MHGWLLLVWVQGLIQAAFLATAIGATAGTIDTKRNISAEEGGSVILQCHFSSD |
| | | sequence | TAEVTQVDWKQQDQLLAIYSVDLGWHVASVFSDRVVPGPSLGLTFQSLT |
| | | Uniprot accession number: | MNDTGEYFCTYHTYPGGIYKGRIFLKVQESSDDRNGLAQFQTAPLGGTM |
| | | P86176-1 | AAVLGLICLMVTGVTVLARKDKSIRMHSIESGLGRTEAEPQEWNLRSLSSPGSPVQ |
| | | Protein domains annotated as | TQTAPAGPCGEQAEDDYADPQEYFNVLSYRSLESFIAVSKTG |
| | | follows: Signal peptide (double | |
| | | line), extracellular domain | |
| | | (bold), transmembrane domain | |
| | | (italic) and cytoplasmatic | |
| | | domain (underlined) | |
| 560 | Mouse TIGIT-His | Mouse TIGIT-His amino acid | MHGWLLLVWVQGLIQAAFLATGATAGTIDTKRNISAEEGGSVILQCHFSSDTAEVT |
| | Sino Biological | sequence | QVDWKQQDQLLAIYSVDLGWHVASVFSDRVVPGPSLGLTFQSLTMNDTGEYFCT |
| | 50939-M08H | NCBI accession number: | YHTYPGGIYKGRIFLKVQESSVAQFQTAPLG |
| | | NP_001139797.1 | |
| | | Expressed protein Met 1- | |
| | | Gly 141 as per full length | |
| | | sequence | |
| 561 | Mouse TIGIT-Fc | Mouse TIGIT-Fc amino acid | MHGWLLLVWVQGLIQAAFLATGATAGTIDTKRNISAEEGGSVILQCHFS5DTAEVT |
| | Sino Biological | sequence | QVDWKQQDQLLAIYSVDLGWHVASVFSDRVVPGPSLGLTFQSLTMNDTGEYFCT |
| | 50939-M02H | NCBI accession number: | YHTYPGGIYKGRIFLKVQESSVAQFQTAPLG |
| | | NP_001139797.1 | |
| | | Expressed protein Met 1- | |
| | | Gly 141 as per full length | |
| | | sequence | |
| 562 | Mouse TIGIT-Fc | Mouse TIGIT-Fc Amino acid | GTIDTKRNISAEEGGSVILQCHFSSDTAEVTQVDWKQQDQLLAIYSVDL |
| | R&D, Catalogue | sequence | GWHVASVFSDRVVPGPSLGLTFQSLTMNDTGEYFCTYHTYPGGIYKGRI |
| | number 7267_TG | NCBI accession number: | FLKVQESSVAQFQTAPLGGTIEGRMDPEPRGPTIKPCPPCKCPAPNLLGGPSVFI |
| | | NP_001139797 | FPPKIKDVLMISLSPIVTCVVVDVSEDDPDVQISWFVNNVEVNTAQTQTHREDYNS |
| | | Expressed protein Gly26- | TLRWSALPIQHQDWMSGKEFKCKVNNKDLPAPIERTISKPKGSVRAPQVYVLPPP |
| | | Thr 143 (bold) as per full | EEEMTKKQVTLTCMVTDFMPEDIYVEWTNNGKTELNYKNTEPVLDSDGSYFMYSK |
| | | length sequence | LRVEKKNWVERNSYSCSWHEGLHNHHTTKSFSRTPGK |
| | | Linker and mouse IgG2a Fc tag | |
| | | (Glu98-Lys330) (italic) | |
| 563 | Human CD155 | Human CD155 amino acid | MARAMAAAWPLLLVALLVLSWPPPGTGDVVVQAPTQVPGFLGDSVTLPCYL |
| | | sequence | QVPNMEVTHVSQLTWARHGESGSMAVFHQTQGPSYSESKRLEFVAARL |
| | | NCBI accession number: | GAELRNASLRMFGLRVEDEGNYTCLFVTFPQGSRSVDIWLRVLAKPQNT |
| | | NM_006505.4 | AEVQKVQLTGEPVPMARCVSTGGRPPAQITWHSDLGGMPNTSQVPGFL |
| | | Protein domains annotated as | SGTVTVTSLWILVPSSQVDGKNVTCKVEHESFEKPQLLTVNLTVYYPPEV |
| | | follows: | SISGYDNNWYLGQNEATLTCDARSNPEPTGYNWSTTMGPLPPFAVAQG |
| | | Signal peptide (double line), | AQLLIRPVDKPINTTLICNVTNALGARQAELTVQVKEGPPSEHSGMSRNA |
| | | extracellular domain (bold), | IIFLVLGILVFLILLGIGIYFYWSKCSREVLWHCHLCPSSTEHASASANGHVSYSAVS |
| | | transmembrane domain (italic) | RENSSSQDPQTEGTR |
| | | and cytoplasmatic domain | |
| | | (underlined) | |
| 564 | Human CD155 | Nucleotide sequence encoding | AGCGGGACTGAGCGCCGGGAGAGACCTGCGCAGGCGCAGGCGCGCGGGGAGG |
| | | human CD155 | GCCAGCCTGGGTGGCCCACCCCGCGCCTGGCGGGACTGGCCGCCAACTCCCCTC |
| | | NCBI accession number: | CGCTCCAGTCACTTGTCTGGAGCTTGAAGAAGTGGGTATTCCCCTTCCCACCCC |
| | | NM_006505.4 | AGGCACTGGAGGAGCGGCCCCCCGGGGATTCCAGGACCTGAGCTCCGGGAGCT |
| | | | GGACTCGCAGCGACCGCGGCAGAGCGAGCGGGCGCCGGGAAGCGAGGAGACGC |
| | | | CCGCGGGAGGCCCAGCTGCTCGGAGCAACTGGCATGGCCCGAGCCATGGCCGC |
| | | | CGCGTGGCCGCTGCTGCTGGTGGCGCTACTGGTGCTGTCCTGGCCACCCCCAG |
| | | | GAACCGGGGACGTCGTCGTGCAGGCGCCCACCCAGGTGCCCGGCTTCTTGGGC |
| | | | GACTCCGTGACGCTGCCCTGCTACCTACAGGTGCCCAACATGGAGGTGACGCAT |
| | | | GTGTCACAGCTGACTTGGGCGCGGCATGGTGAATCTGGCAGCATGGCCGTCTTC |
| | | | CACCAAACGCAGGGCCCCAGCTATTCGGAGTCCAAACGGCTGGAATTCGTGGCA |
| | | | GCCAGACTGGGCGCGGAGCTGCGGAATGCCTCGCTGAGGATGTTCGGGTTGCG |
| | | | CGTAGAGGATGAAGGCAACTACACCTGCCTGTTCGTCACGTTCCCGCAGGGCAG |
| | | | CAGGAGCGTGGATATCTGGCTCCGAGTGCTTGCCAAGCCCCAGAACACAGCTGA |
| | | | GGTTCAGAAGGTCCAGCTCACTGGAGAGCCAGTGCCCATGGCCCGCTGCGTCTC |
| | | | CACAGGGGGTCGCCCGCCAGCCCAAATCACCTGGCACTCAGACCTGGGCGGGAT |
| | | | GCCCAATACGAGCCAGGTGCCAGGGTTCCTGTCTGGCACAGTCACTGTCACCAG |
| | | | CCTCTGGATATTGGTGCCCTCAAGCCAGGTGGACGGCAAGAATGTGACCTGCAA |
| | | | GGTGGAGCACGAGAGCTTTGAGAAGCCTCAGCTGCTGACTGTGAACCTCACCGT |
| | | | GTACTACCCCCCAGAGGTATCCATCTCTGGCTATGATAACAACTGGTACCTTGGC |
| | | | CAGAATGAGGCCACCCTGACCTGCGATGCTCGCAGCAACCCAGAGCCCACAGGC |
| | | | TATAATTGGAGCACGACCATGGGTCCCCTGCCACCCTTTGCTGTGGCCCAGGGC |
| | | | GCCCAGCTCCTGATCCGTCCTGTGGACAAACCAATCAACACAACTTTAATCTGCA |
| | | | ACGTCACCAATGCCCTAGGAGCTCGCCAGGCAGAACTGACCGTCCAGGTCAAAG |
| | | | AGGGACCTCCCAGTGAGCACTCAGGCATGTCCCGTAACGCCATCATCTTCCTGG |
| | | | TTCTGGGAATCCTGGTTTTTCTGATCCTGCTGGGGATCGGGATTTATTTCTATT |
| | | | GGTCCAAATGTTCCCGTGAGGTCCTTTGGCACTGTCATCTGTGTCCCTCGAGTA |
| | | | CAGAGCATGCCAGCGCCTCAGCTAATGGGCATGTCTCCTATTCAGCTGTGAGCA |
| | | | GAGAGAACAGCTCTTCCCAGGATCCACAGACAGAGGGCACAAGGTGACAGCGTC |
| | | | GGGACTGAGAGGGGAGAGAGACTGGAGCTGGCAAGGACGTGGGCCTCCAGAGT |
| | | | TGGACCCGACCCCAATGGATGAAGACCCCCTCCAAAGAGACCAGCCTCCCTCCC |
| | | | TGTGCCAGACCTCAAAACGACGGGGGCAGGTGCAAGTTCATAGGTCTCCAAGAC |
| | | | CACCCTCCTTTCATTTGCTAGAAGGACTCACTAGACTCAGGAAAGCTGTTAGGCT |
| | | | CACAGTTACAGTTTATTACAGTAAAAGGACAGAGATTAAGATCAGCAAAGGGAG |
| | | | GAGGTGCACAGCACACGTTCCACGACAGATGAGGCGACGGCTTCCATCTGCCCT |
| | | | CTCCCAGTGGAGCCATATAGGCAGCACCTGATTCTCACAGCAACATGTGACAAC |
| | | | ATGCAAGAAGTACTGCCAATACTGCCAACCAGAGCAGCTCACTCGAGATCTTTG |
| | | | TGTCCAGAGTTTTTTGTTTGTCTTGAGACAGGGTCTGGCTCTGTTGGCAGACTA |
| | | | GAGTACAGTGGTGAGATCACAGTTCATTGCAGCCTTGACTTCTCAACGCCAAGT |
| | | | CATCCTCCCACCTCAGCCTCCTGAGTAGCTATGACTACAGGTATGTGCCACCACG |
| | | | TCTGGCTAATCTTTTTATTATTTGTAAAGTCGAGGTTTCCCTGTGTTGCCCAGGC |
| | | | TGGTCTTGAACTCTTGGCTCCAAGTGATACTTCTGCCTTGGCCTCCCAAAGTGCT |
| | | | GAATTAAGCAGCTCACCATCCACACGGCTGACCTCATACATCAAGCCAATACCGT |
| | | | GTGGCCCAAGACCCCCACCATAAATCACATCATTAGCATGAACCACCCAGAGTG |
| | | | GCCCAAGACTCCAAGATCAGCTACCAGGCAGGATATTCCAAGGGCTTAGAGATG |
| | | | AATGCCCAGGAGCTGAGGATAAAGGGCCCGATCTTTCTTTGGGCAAGGTTAAGC |
| | | | CTTTACTGCATAGCAGACCACACAGAAGGGTGTGGGCCACCAGAGAATTTTGGT |
| | | | AAAAATTTGGCCTCTGGCCTTGAGCTTCTAAATCTCTGTATCCGTCAGATCTCTG |
| | | | TGGTTACAAGAAACAGCCACTGACCCTGGTCACCAGAGGCTGCAATTCAGGCCG |
| | | | CAAGCAGCTGCCTGGGGGGTGTCCAAGGAGCAGAGAAAACTACTAGATGTGAAC |
| | | | TTGAAGAAGGTTGTCAGCTGCAGCCACTTTCTGCCAGCATCTGCAGCCACTTTC |
| | | | TGCCAGCATCTGCAGCCAGCAAGCTGGGACTGGCAGGAAATAACCCACAAAAGA |
| | | | AGCAAATGCAATTTCCAACACAAGGGGGAAGGGATGCAGGGGGAGGCAGCGCT |
| | | | GCAGTTGCTCAGGACACGCTCCTATAGGACCAAGATGGATGCGACCCAAGACCC |
| | | | AGGAGGCCCAGCTGCTCAGTGCAACTGACAAGTTAAAAAGGTCTATGATCTTGA |
| | | | GGGCAGACAGCAGAATTCCTCTTATAAAGAAAACTGTTTGGGAAAATACGTTGA |
| | | | GGGAGAGAAGACCTTGGGCCAAGATGCTAAATGGGAATGCAAAGCTTGAGCTG |
| | | | CTCTGCAAGAGAAAATAAGCAGGACAGAGGATTTGCTCTGGACAGAGATGGAAG |
| | | | AGCCGGGAACAGAGAAGTGTGGGGAAGAGATAGGAACCAGCAGGATGGCAGGG |
| | | | GCAAAGGGCTCAAGGGTGAGGAGGCCAGTGGGACCCCACAGAGTTGGGGAGAT |
| | | | AAAGGAACATTGGTTGCTTTGGTGGCACGTAAGCTCCTTGTCTGTCTCCAGCAC |
| | | | CCAGAATCTCATTAAAGCTTATTTATTGTACCTCCAGCGGCTGTGTGCAATGGG |
| | | | GTCTTTTGTGGAAATCAAGGAGCAGACAGGTTTCATGTGTACTGTCACCACGTG |
| | | | GGATGGAACCAGAGGCATGGAAGCAAGACGCTAAATGAAGAGGGCCATAAGGG |
| | | | CTGGGATTCCCAGGCACCTTAGGAACAGCTTGTCTTTTTTTTTTCCTCTCCAAA |
| | | | AAAAATGTTTAAGGGACGGTGTCTCCTGTCACCCAGGCTGGAGTGCAATGGCAC |
| | | | GATCATAGCTCATTGCAGCCTCTAACTCCGGGGCTCAAGCAATCCTCCCACCTCA |
| | | | GCCTACCAAGTAGCTGTGACCACAGCTGCCCCTCACCATGCTAAGCTAATTTTTT |
| | | | TAATTAGATAGTACATAAACGTCCCAAAATTAGAAGATAAAAAGACATGAGGGAT |
| | | | CCATTCTAATTTGTGTTTGGAGTGTAATGGTCCAGCTCCATTCTTCTGCACATGG |
| | | | ATATCCAGTTTTACACAACACTGTGAATGTAATGAATGCCACTGAATCATACACT |
| | | | CAAAAATAGCTAAAATGGCAAATTGTCTGTTATCTCTTTTTAACCACCATTTTTG |
| | | | AAAATTAATTATACCAAAAAACCATTGAATAGTGCACTTTATTTATTTATTTATTT |
| | | | GTTTATTTATTTATTTATTTTAGAAATAAGAGTCTCACTTTGTTGCCCAGGCTGG |
| | | | AGTGCAGTGGCGTGATCATGGCTCATTGCAGCCTCGACCTGCTGGGCTCGGGCT |
| | | | ATCCTTCCATCTCAGCCTCCCGAGTAGCTGGGACTATAGGTGGGCGCCACCCCA |
| | | | CCTGGCTAAATCTCTTTTTAACTTTTGTAGAGATAGGCATCTCGCTATGTTGCCT |
| | | | AGGCTGGGCTGGAACTCCTGGGCTCAAGTGCTCCTCCTGCCTTGGCCTCCCAAA |
| | | | GCGCTAGGATTACAGATGTGAGCCACCGCGCCCACCCTGAACCTTACTTTTTTT |
| | | | GCTCAGTTTCTGGTAATTCAGAGAATGCCTCCTGAGTTGTTCTACACCCACCTCA |
| | | | TATTCCATGGGAGGGCTGTACAGGGCTTTTTTAACGAGGCCTCTAAGGACAGGC |
| | | | ATTTGTATCCTTTCCAGCCTTTCACTATTACAATGTTGTAGTGAATAACTTTAA |
| | | | CACTGTCATTTATTTTACTTTTTTTTTTTTTTATTTTAGAGAAAGGAATCTTGCCA |
| | | | TCTTGCCCAGGCTGGTCTCAAATTCCTGGGCCCAAACAATCCTCCCGCCTTGGC |
| | | | CTCCTAAAGTACTGGGATTTATAGGCATAAGCCACCGTGCCTGGCCAATGCACA |
| | | | CTGTCATTTAGCTCATGTTAACACCTGAGTGTAGGACACACTCCTGGAGGTGGA |
| | | | ATTGCTGGGCCAAAGAGTATGTTTCTTGTCATTGTGATAGATATTGACAAATGA |
| | | | ACCCTCACAGAAGTTGTGCTGAGTTCTGTTCCCACCAGCGACGTAGGCGATGAC |
| | | | CTTTTTCTGGAGGGAGGGGGCATCCTTGGAGTCCACAGAGCCAGGAATGGAGA |
| | | | GTGGGCCCAGAATTTTGGTATAGGTGTTGTATAAACTTATAGTAAGGTTAAGAA |
| | | | AACCGCAACTATCCTTATCAGAGACTTGGCGGGGGGCAGGGTATGATGGAGATC |
| | | | ATAAGGAGGCTAAAACACTCCACACCCTCCCTCTGCATTGCTCCTGCACGGGAG |
| | | | TCGGGAATCTTTTCAGGTTGATACGATCTCACCTTGAGGAGCTGTGAGGTCCCA |
| | | | GAAGCCTCTGGGTTGCAGATTGCTTGGGGTGAAAATGTCTGTGCTACTGAAATC |
| | | | TAACTTTTTACAAAAAATTACGGGCTGGGCGCAGTGGCTCACGCCTGTAATCCC |
| | | | AGCACTTTGGGAGGCTGCAGCGGGTGGATCACTTGAGGTAAGGAGTTCAAGAC |
| | | | CAGACCATAGTGAAACCGTGTCTCTACAAAAAAAATTAGCCAGGTGTGGTGGTG |
| | | | CATGCTTGTAATCCCAGCTACTCAGAAGGCTGAGGTGGGAGAATCCCTTGAACC |
| | | | CGGGAAGTGGAGGCTGGAGTAAACCATGATCGAGTTACTGCACTCCAGCCTGGG |
| | | | TGACAAGAGTGAGACTCTGTCTCCAAAAAAAAAAAAAAAAAAAAAAAAACTGGAT |
| | | | TGCCTGGCTCTACTCCGGGCACAGCATGCAGGCCCAGTTCTGCTGCTCTGCTGT |
| | | | TTGTTCTGCTTTCCTCCACATATTGGCATCACCCTCTGGTGCCAAGATGGCTGCT |
| | | | GCATTCCAGGCATCACATCCAGACTCAGACCCAGAGAAGCTGCCCATCCCTACCT |
| | | | GGGTGAGCCTTTGTAGGAACGAGAAACCGCATCCAGCAGCAGAAACCTCACCCA |
| | | | GCAGCGTCTTTTCCGGTCTCATTCACCAGCGCCGCCCACCGCTCAACCAATCCCT |
| | | | GGCCAAAAGAATGGGACCGCCTGGAAGGCTGGACCAAACAGGACCTGCCCTCTG |
| | | | GGGCTGGGGAGAGGCCCAGATGAAGGCTGCAGGACAGGATGGACTCCTAGACC |
| | | | TCTGTTACCAGCAGTGACTACCTCTGTCTGGGTGGTTGGAACATGTTTGAATTT |
| | | | TATTCTAAGTACTGTCTACAAGTTCTGCAATAAACCTTGACTCTTCTTTTAATAA |
| | | | TGCAAA |
| 565 | Human CD155 | Human CD155 Variant alpha | MARAMAAAWPELVALLVLSWPPPGTGDVVVQAPTQVPGFLGDSVTLPCYL |
| | | amino acid sequence | QVPNMEVTHVSQLTWARHGESGSMAVFHQTQGPSYSESKRLEFVAARL |
| | | Unip rot accession number: | GAELRNASLRMFGLRVEDEGNYTCLFVTFPQGSRSVDIWLRVLAKPQNT |
| | | P15151-1 | AEVQKVQLTGEPVPMARCVSTGGRPPAQITWHSDLGGMPNTSQVPGFL |
| | | Protein domains annotated as | SGTVTVTSLWILVPSSQVDGKNVTCKVEHESFEKPQLLTVNLTVYYPPEV |
| | | follows: | SISGYDNNWYLGQNEATLTCDARSNPEPTGYNWSTTMGPLPPFAVAQG |
| | | Signal peptide (double line), | AQLLIRPVDKPINTTLICNVTNALGARQAELTVQVKEGPPSEHSGISRNAI |
| | | extracellular domain (bold), | IFLVLGILVFLILLGIGIYFYWSKCSREVLWHCHLCPSSTEHASASANGHVSYSAVSR |
| | | transmembrane domain (italic) | ENSSSQDPQTEGTR |
| | | and cytoplasmatic domain | |
| | | (underlined) | |
| 566 | Human CD155 | Human CD155 Variant beta | MARAMAAAWPLLLVALLVLSWPPPGTGDVVVQAPTQVPGFLGDSVTLPCYLQVPN |
| | | amino acid sequence | MEVTHVSQLTWARHGESGSMAVFHQTQGPSYSESKRLEFVAARLGAELRNASLRM |
| | | NCBI accession number: | FGLRVEDEGNYTCLFVTFPQGSRSVDIWLRVLAKPQNTAEVQKVQLTGEPVPMAR |
| | | NM_001135768. 2 | CVSTGGRPPAQITWHSDLGGMPNTSQVPGFLSGTVTVTSLWILVPSSQVDGKNVT |
| | | Uniprot accession number: | CKVEHESFEKPQLLTVNLTVYYPPEVSISGYDNNWYLGQNEATLTCDARSNPEPTG |
| | | P15151-2 | YNWSTTMGPLPPFAVAQGAQLLIRPVDKPINTTLICNVTNALGARQAELTVQVKEG |
| | | Differs from P15151-1 (Seq ID | PPSEHSGTEHASASANGHVSYSAVSRENSSSQDPQTEGTR |
| | | NO: 565): | |
| | | 340-384: Missing. | |
| 567 | Human CD155 | Nucleotide sequence encoding | AGCGGGACTGAGCGCCGGGAGAGACCTGCGCAGGCGCAGGCGCGCGGGGAGG |
| | | human CD155 Variant beta | GCCAGCCTGGGTGGCCCACCCCGCGCCTGGCGGGACTGGCCGCCAACTCCCCTC |
| | | NCBI accession number: | CGCTCCAGTCACTTGTCTGGAGCTTGAAGAAGTGGGTATTCCCCTTCCCACCCC |
| | | NM_001135768.2 | AGGCACTGGAGGAGCGGCCCCCCGGGGATTCCAGGACCTGAGCTCCGGGAGCT |
| | | | GGACTCGCAGCGACCGCGGCAGAGCGAGCGGGCGCCGGGAAGCGAGGAGACGC |
| | | | CCGCGGGAGGCCCAGCTGCTCGGAGCAACTGGCATGGCCCGAGCCATGGCCGC |
| | | | CGCGTGGCCGCTGCTGCTGGTGGCGCTACTGGTGCTGTCCTGGCCACCCCCAG |
| | | | GAACCGGGGACGTCGTCGTGCAGGCGCCCACCCAGGTGCCCGGCTTCTTGGGC |
| | | | GACTCCGTGACGCTGCCCTGCTACCTACAGGTGCCCAACATGGAGGTGACGCAT |
| | | | GTGTCACAGCTGACTTGGGCGCGGCATGGTGAATCTGGCAGCATGGCCGTCTTC |
| | | | CACCAAACGCAGGGCCCCAGCTATTCGGAGTCCAAACGGCTGGAATTCGTGGCA |
| | | | GCCAGACTGGGCGCGGAGCTGCGGAATGCCTCGCTGAGGATGTTCGGGTTGCG |
| | | | CGTAGAGGATGAAGGCAACTACACCTGCCTGTTCGTCACGTTCCCGCAGGGCAG |
| | | | CAGGAGCGTGGATATCTGGCTCCGAGTGCTTGCCAAGCCCCAGAACACAGCTGA |
| | | | GGTTCAGAAGGTCCAGCTCACTGGAGAGCCAGTGCCCATGGCCCGCTGCGTCTC |
| | | | CACAGGGGGTCGCCCGCCAGCCCAAATCACCTGGCACTCAGACCTGGGCGGGAT |
| | | | GCCCAATACGAGCCAGGTGCCAGGGTTCCTGTCTGGCACAGTCACTGTCACCAG |
| | | | CCTCTGGATATTGGTGCCCTCAAGCCAGGTGGACGGCAAGAATGTGACCTGCAA |
| | | | GGTGGAGCACGAGAGC |
| | | | TTTGAGAAGCCTCAGCTGCTGACTGTGAACCTCACCGTGTACTACCCCCCAGAG |
| | | | GTATCCATCTCTGGCTATGATAACAACTGGTACCTTGGCCAGAATGAGGCCACC |
| | | | CTGACCTGCGATGCTCGCAGCAACCCAGAGCCCACAGGCTATAATTGGAGCACG |
| | | | ACCATGGGTCCCCTGCCACCCTTTGCTGTGGCCCAGGGCGCCCAGCTCCTGATC |
| | | | CGTCCTGTGGACAAACCAATCAACACAACTTTAATCTGCAACGTCACCAATGCCC |
| | | | TAGGAGCTCGCCAGGCAGAACTGACCGTCCAGGTCAAAGAGGGACCTCCCAGTG |
| | | | AGCACTCAGGTACAGAGCATGCCAGCGCCTCAGCTAATGGGCATGTCTCCTATT |
| | | | CAGCTGTGAGCAGAGAGAACAGCTCTTCCCAGGATCCACAGACAGAGGGCACAA |
| | | | GGTGACAGCGTCGGGACTGAGAGGGGAGAGAGACTGGAGCTGGCAAGGACGTG |
| | | | GGCCTCCAGAGTTGGACCCGACCCCAATGGATGAAGACCCCCTCCAAAGAGACC |
| | | | AGCCTCCCTCCCTGTGCCAGACCTCAAAACGACGGGGGCAGGTGCAAGTTCATA |
| | | | GGTCTCCAAGACCACCCTCCTTTCATTTGCTAGAAGGACTCACTAGACTCAGGAA |
| | | | AGCTGTTAGGCTCACAGTTACAGTTTATTACAGTAAAAGGACAGAGATTAAGAT |
| | | | CAGCAAAGGGAGGAGGTGCACAGCACACGTTCCACGACAGATGAGGCGACGGC |
| | | | TTCCATCTGCCCTC |
| | | | TCCCAGTGGAGCCATATAGGCAGCACCTGATTCTCACAGCAACATGTGACAACA |
| | | | TGCAAGAAGTACTGCCAATACTGCCAACCAGAGCAGCTCACTCGAGATCTTTGT |
| | | | GTCCAGAGTTTTTTGTTTGTCTTGAGACAGGGTCTGGCTCTGTTGGCAGACTAG |
| | | | AGTACAGTGGTGAGATCACAGTTCATTGCAGCCTTGACTTCTCAACGCCAAGTC |
| | | | ATCCTCCCACCTCAGCCTCCTGAGTAGCTATGACTACAGGTATGTGCCACCACGT |
| | | | CTGGCTAATCTTTTTATTATTTGTAAAGTCGAGGTTTCCCTGTGTTGCCCAGGCT |
| | | | GGTCTTGAACTCTTGGCTCCAAGTGATACTTCTGCCTTGGCCTCCCAAAGTGCT |
| | | | GAATTAAGCAGCTCACCATCCACACGGCTGACCTCATACATCAAGCCAATACCGT |
| | | | GTGGCCCAAGACCCCCACCATAAATCACATCATTAGCATGAACCACCCAGAGTG |
| | | | GCCCAAGACTCCAAGATCAGCTACCAGGCAGGATATTCCAAGGGCTTAGAGATG |
| | | | AATGCCCAGGAGCTGAGGATAAAGGGCCCGATCTTTCTTTGGGCAAGGTTAAGC |
| | | | CTTTACTGCATAGCAGACCACACAGAAGGGTGTGGGCCACCAGAGAATTTTGGT |
| | | | AAAAATTTGGCCTCTGGCCTTGAGCTTCTAAATCTCTGTATCCGTCAGATCTCTG |
| | | | TGGTTACAAGAAACAGCCACTGACCCTGGTCACCAGAGGCTGCAATTCAGGCCG |
| | | | CAAGCAGCTGCCTGGGGGGTGTCCAAGGAGCAGAGAAAACTACTAGATGTGAAC |
| | | | TTGAAGAAGGTTGTCAGCTGCAGCCACTTTCTGCCAGCATCTGCAGCCACTTTC |
| | | | TGCCAGCATCTGCAGCCAGCAAGCTGGGACTGGCAGGAAATAACCCACAAAAGA |
| | | | AGCAAATGCAATTTCCAACACAAGGGGGAAGGGATGCAGGGGGAGGCAGCGCT |
| | | | GCAGTTGCTCAGGACACGCTCCTATAGGACCAAGATGGATGCGACCCAAGACCC |
| | | | AGGAGGCCCAGCTGCTCAGTGCAACTGACAAGTTAAAAAGGTCTATGATCTTGA |
| | | | GGGCAGACAGCAGAATTCCTCTTATAAAGAAAACTGTTTGGGAAAATACGTTGA |
| | | | GGGAGAGAAGACCTTGGGCCAAGATGCTAAATGGGAATGCAAAGCTTGAGCTG |
| | | | CTCTGCAAGAGAAAATAAGCAGGACAGAGGATTTGCTCTGGACAGAGATGGAAG |
| | | | AGCCGGGAACAGAGAAGTGTGGGGAAGAGATAGGAACCAGCAGGATGGCAGGG |
| | | | GCAAAGGGCTCAAGGGTGAGGAGGCCAGTGGGACCCCACAGAGTTGGGGAGAT |
| | | | AAAGGAACATTGGTTGCTTTGGTGGCACGTAAGCTCCTTGTCTGTCTCCAGCAC |
| | | | CCAGAATCTCATTAAAGCTTATTTATTGTACCTCCAGCGGCTGTGTGCAATGGG |
| | | | GTCTTTTGTGGAAATCAAGGAGCAGACAGGTTTCATGTGTACTGTCACCACGTG |
| | | | GGATGGAACCAGAGGCATGGAAGCAAGA |
| | | | CGCTAAATGAAGAGGGCCATAAGGGCTGGGATTCCCAGGCACCTTAGGAACAGC |
| | | | TTGTCTTTTTTTTTTTCCTCTCCAAAAAAAATGTTTAAGGGACGGTGTCTCCTGT |
| | | | CACCCAGGCTGGAGTGCAATGGCACGATCATAGCTCATTGCAGCCTCTAACTCC |
| | | | GGGGCTCAAGCAATCCTCCCACCTCAGCCTACCAAGTAGCTGTGACCACAGCTG |
| | | | CCCCTCACCATGCTAAGCTAATTTTTTTAATTAGATAGTACATAAACGTCCCAAA |
| | | | ATTAGAAGATAAAAAGACATGAGGGATCCATTCTAATTTGTGTTTGGAGTGTAA |
| | | | TGGTCCAGCTCCATTCTTCTGCACATGGATATCCAGTTTTACACAACACTGTGAA |
| | | | TGTAATGAATGCCACTGAATCATACACTCAAAAATAGCTAAAATGGCAAATTGTC |
| | | | TGTTATCTCTTTTTAACCACCATTTTTGAAAATTAATTATACCAAAAAACCATTGA |
| | | | ATAGTGCACTTTATTTATTTATTTATTTGTTTATTTATTTATTTATTTTAGAAATA |
| | | | AGAGTCTCACTTTGTTGCCCAGGCTGGAGTGCAGTGGCGTGATCATGGCTCATT |
| | | | GCAGCCTCGACCTGCTGGGCTCGGGCTATCCTTCCATCTCAGCCTCCCGAGTAG |
| | | | CTGGGACTATAGGTGGGCGCCACCCCACCTGGCTAAATCTCTTTTTAACTTTTGT |
| | | | AGAGATAGGCATCTCGCTATGTTGCCTAGGCTGGGCTGGAACTCCTGGGCTCAA |
| | | | GTGCTCCTCCTGCCTTGGCCTCCCAAAGCGCTAGGATTACAGATGTGAGCCACC |
| | | | GCGCCCACCCTGAACCTTACTTTTTTTGCTCAGTTTCTGGTAATTCAGAGAATGC |
| | | | CTCCTGAGTTGTTCTACACCCACCTCATATTCCATGGGAGGGCTGTACAGGGCT |
| | | | TTTTTAACGAGGCCTCTAAGGACAGGCATTTGTATCCTTTCCAGCCTTTCACTAT |
| | | | TACAATGTTGTAGTGAATAACTTTACACACTGTCATTTATTTTACTTTTTTTTTTT |
| | | | TTTATTTTAGAGAAAGGAATCTTGCCATCTTGCCCAGGCTGGTCTCAAATTCCTG |
| | | | GGCCCAAACAATCCTCCCGCCTTGGCCTCCTAAAGTACTGGGATTTATAGGCAT |
| | | | AAGCCACCGTGCCTGGCCAATGCACACTGTCATTTAGCTCATGTTAACACCTGA |
| | | | GTGTAGGACACACTCCTGGAGGTGGAATTGCTGGGCCAAAGAGTATGTTTCTTG |
| | | | TCATTGTGATAGATATTGACAAATGAACCCTCACAGAAGTTGTGCTGAGTTCTGT |
| | | | TCCCACCAGCGACGTAGGCGATGACCTTTTTCTGGAGGGAGGGGGCATCCTTGG |
| | | | AGTCCACAGAGCCAGGAATGGAGAGTGGGCCCAGAATTTTGGTATAGGTGTTGT |
| | | | ATAAACTTATAGTAAGGTTAAGAAAACCGCAACTATCCTATCAGAGACTTGGCG |
| | | | GGGGGCAGGGTATGATGGAGATCATAAGGAGGCTAAAACACTCCACACCCTCCC |
| | | | TCTGCATTGCTCCTGCACGGGAGTCGGGAATCTTTTCAGGTTGATACGATCTCA |
| | | | CCTTGAGGAGCTGTGAGGTCCCAGAAGCCTCTGGGTTGCAGATTGCTTGGGGT |
| | | | GAAAATGTCTGTGCTACTGAAATCTAACTTTTTACAAAAAATTACGGGCTGGGC |
| | | | GCAGTGGCTCACGCCTGTAATCCCAGCACTTTGGGAGGCTGCAGCGGGTGGATC |
| | | | ACTTGAGGTAAGGAGTTCAAGACCAGACCATAGTGAAACCGTGTCTCTACAAAA |
| | | | AAAATTAGCCAGGTGTGGTGGTGCATGCTTGTAATCCCAGCTACTCAGAAGGCT |
| | | | GAGGTGGGAGAATCCCTTGAACCCGGGAAGTGGAGGCTGGAGTAAACCATGAT |
| | | | CGAGTTACTGCACTCCAGCCTGGGTGACAAGAGTGAGACTCTGTCTCCAAAAAA |
| | | | AAAAAAAAAAAAAAAAAAACTGGATTGCCTGGCTCTACTCCGGGCACAGCATGC |
| | | | AGGCCCAGTTCTGCTGCTCTGCTGTTTGTTCTGCTTTCCTCCACATATTGGCATC |
| | | | ACCCTCTGGTGCCAAGATGGCTGCTGCATTCCAGGCATCACATCCAGACTCAGA |
| | | | CCCAGAGAAGCTGCCCATCCCTACCTGGGTGAGCCTTTGTAGGAACGAGAAACC |
| | | | GCATCCAGCAGCAGAAACCTCACCCAGCAGCGTCTTTTCCGGTCTCATTCACCAG |
| | | | CGCCGCCCACCGCTCAACCAATCCCTGGCCAAAAGAATGGGACCGCCTGGAAGG |
| | | | CTGGACCAAACAGGACCTGCCCTCTGGGGCTGGGGAGAGGCCCAGATGAAGGC |
| | | | TGCAGGACAGGATGGACTCCTAGACCTCTGTTACCAGCAGTGACTACCTCTGTC |
| | | | TGGGTGGTTGGAACATGTTTGAATTTTATTCTAAGTACTGTCTACAAGTTCTGCA |
| | | | ATAAACCTTGACTCTTCTTTTAATAATGCAAA |
| 568 | Human CD155 | Human CD155 Variant gamma | MARAMAAAWPLLLVALLVLSWPPPGTGDVVVQAPTQVPGFLGDSVTLPCYLQVPN |
| | | amino acid sequence | MEVTHVSQLTWARHGESGSMAVFHQTQGPSYSESKRLEFVAARLGAELRNASLRM |
| | | NCBI accession number: | FGLRVEDEGNYTCLFVTFPQGSRSVDIWLRVLAKPQNTAEVQKVQLTGEPVPMAR |
| | | NM_001135769.2 | CVSTGGRPPAQITWHSDLGGMPNTSQVPGFLSGTVTVTSLWILVPSSQVDGKNVT |
| | | Uniprot accession number: | CKVEHESFEKPQLLTVNLTVYYPPEVSISGYDNNWYLGQNEATLTCDARSNPEPTG |
| | | P15151-3 | YNWSTTMGPLPPFAVAQGAQLLIRPVDKPINTTLICNVTNALGARQAELIVQVKGT |
| | | Differs from P15151-1 (Seq ID | EHASASANGHVSYSAVSRENSSSQDPQTEGTR |
| | | No: 565): | |
| | | 331-331: E → G | |
| | | 332-384: Missing | |
| 569 | Human CD155 | Nucleotide sequence encoding | AGCGGGACTGAGCGCCGGGAGAGACCTGCGCAGGCGCAGGCGCGCGGGGAGG |
| | | human CD155 Variant gamma | GCCAGCCTGGGTGGCCCACCCCGCGCCTGGCGGGACTGGCCGCCAACTCCCCTC |
| | | NCBI accession number: | CGCTCCAGTCACTTGTCTGGAGCTTGAAGAAGTGGGTATTCCCCTTCCCACCCC |
| | | NM_001135769. 2 | AGGCACTGGAGGAGCGGCCCCCCGGGGATTCCAGGACCTGAGCTCCGGGAGCT |
| | | | GGACTCGCAGCGACCGCGGCAGAGCGAGCGGGCGCCGGGAAGCGAGGAGACGC |
| | | | CCGCGGGAGGCCCAGCTGCTCGGAGCAACTGGCATGGCCCGAGCCATGGCCGC |
| | | | CGCGTGGCCGCTGCTGCTGGTGGCGCTACTGGTGCTGTCCTGGCCACCCCCAG |
| | | | GAACCGGGGACGTCGTCGTGCAGGCGCCCACCCAGGTGCCCGGCTTCTTGGGC |
| | | | GACTCCGTGACGCTGCCCTGCTACCTACAGGTGCCCAACATGGAGGTGACGCAT |
| | | | GTGTCACAGCTGACTTGGGCGCGGCATGGTGAATCTGGCAGCATGGCCGTCTTC |
| | | | CACCAAACGCAGGGCCCCAGCTATTCGGAGTCCAAACGGCTGGAATTCGTGGCA |
| | | | GCCAGACTGGGCGCGGAGCTGCGGAATGCCTCGCTGAGGATGTTCGGGTTGCG |
| | | | CGTAGAGGATGAAGGCAACTACACCTGCCTGTTCGTCACGTTCCCGCAGGGCAG |
| | | | CAGGAGCGTGGATATCTGGCTCCGAGTGCTTGCCAAGCCCCAGAACACAGCTGA |
| | | | GGTTCAGAAGGTCCAGCTCACTGGAGAGCCAGTGCCCATGGCCCGCTGCGTCTC |
| | | | CACAGGGGGTCGCCCGCCAGCCCAAATCACCTGGCACTCAGACCTGGGCGGGAT |
| | | | GCCCAATACGAGCCAGGTGCCAGGGTTCCTGTCTGGCACAGTCACTGTCACCAG |
| | | | CCTCTGGATATTGGTGCCCTCAAGCCAGGTGGACGGCAAGAATGTGACCTGCAA |
| | | | GGTGGAGCACGAGAGC |
| | | | TTTGAGAAGCCTCAGCTGCTGACTGTGAACCTCACCGTGTACTACCCCCCAGAG |
| | | | GTATCCATCTCTGGCTATGATAACAACTGGTACCTTGGCCAGAATGAGGCCACC |
| | | | CTGACCTGCGATGCTCGCAGCAACCCAGAGCCCACAGGCTATAATTGGAGCACG |
| | | | ACCATGGGTCCCCTGCCACCCTTTGCTGTGGCCCAGGGCGCCCAGCTCCTGATC |
| | | | CGTCCTGTGGACAAACCAATCAACACAACTTTAATCTGCAACGTCACCAATGCCC |
| | | | TAGGAGCTCGCCAGGCAGAACTGACCGTCCAGGTCAAAGGTACAGAGCATGCCA |
| | | | GCGCCTCAGCTAATGGGCATGTCTCCTATTCAGCTGTGAGCAGAGAGAACAGCT |
| | | | CTTCCCAGGATCCACAGACAGAGGGCACAAGGTGACAGCGTCGGGACTGAGAG |
| | | | GGGAGAGAGACTGGAGCTGGCAAGGACGTGGGCCTCCAGAGTTGGACCCGACC |
| | | | CCAATGGATGAAGACCCCCTCCAAAGAGACCAGCCTCCCTCCCTGTGCCAGACC |
| | | | TCAAAACGACGGGGGCAGGTGCAAGTTCATAGGTCTCCAAGACCACCCTCCTTT |
| | | | CATTTGCTAGAAGGACTCACTAGACTCAGGAAAGCTGTTAGGCTCACAGTTACA |
| | | | GTTTATTACAGTAAAAGGACAGAGATTAAGATCAGCAAAGGGAGGAGGTGCACA |
| | | | GCACACGTTCCACGACAGATGAGGCGACGGCTTCCATCTGCCCTCTCCCAGTGG |
| | | | AGCCATATAGGCAGCACCTGATTCTCACAGCAACATGTGACAACATGCAAGAAG |
| | | | TACTGCCAATACTGCCAACCAGAGCAGCTCACTCGAGATCTTTGTGTCCAGAGTT |
| | | | TTTTGTTTGTCTTGAGACAGGGTCTGGCTCTGTTGGCAGACTAGAGTACAGTGG |
| | | | TGAGATCACAGTTCATTGCAGCCTTGACTTCTCAACGCCAAGTCATCCTCCCACC |
| | | | TCAGCCTCCTGAGTAGCTATGACTACAGGTATGTGCCACCACGTCTGGCTAATC |
| | | | TTTTTATTATTTGTAAAGTCGAGGTTTCCCTGTGTTGCCCAGGCTGGTCTTGAAC |
| | | | TCTTGGCTCCAAGTGATACTTCTGCCTTGGCCTCCCAAAGTGCTGAATTAAGCA |
| | | | GCTCACCATCCACACGGCTGACCTCATACATCAAGCCAATACCGTGTGGCCCAA |
| | | | GACCCCCACCATAAATCACATCATTAGCATGAACCACCCAGAGTGGCCCAAGACT |
| | | | CCAAGATCAGCTACCAGGCAGGATATTCCAAGGGCTTAGAGATGAATGCCCAGG |
| | | | AGCTGAGGATAAAGGGCCCGATCTTTCTTTGGGCAAGGTTAAGCCTTTACTGCA |
| | | | TAGCAGACCACACAGAAGGGTGTGGGCCACCAGAGAATTTTGGTAAAAATTTGG |
| | | | CCTCTGGCCTTGAGCTTCTAAATCTCTGTATCCGTCAGATCTCTGTGGTTACAAG |
| | | | AAACAGCCACTGACCCTGGTCACCAGAGGCTGCAATTCAGGCCGCAAGCAGCTG |
| | | | CAGGGGGGTGTCCAAGGAGCAGAGAAAACTACTAGATGTGAACTTGAAGAAG |
| | | | GTTGTCAGCTGCAGCCACTTTCTGCCAGCATCTGCAGCCACTTTCTGCCAGCATC |
| | | | TGCAGCCAGCAAGCTGGGACTGGCAGGAAATAACCCACAAAAGAAGCAAATGCA |
| | | | ATTTCCAACACAAGGGGGAAGGGATGCAGGGGGAGGCAGCGCTGCAGTTGCTC |
| | | | AGGACACGCTCCTATAGGACCAAGATGGATGCGACCCAAGACCCAGGAGGCCCA |
| | | | GCTGCTCAGTGCAACTGACAAGTTAAAAAGGTCTATGATCTTGAGGGCAGACAG |
| | | | CAGAATTCCTCTTATAAAGAAAACTGTTTGGGAAAATACGTTGAGGGAGAGAAG |
| | | | ACCTTGGGCCAAGATGCTAAATGGGAATGCAAAGLTTGAGCTGCTCTGCAAGAG |
| | | | AAAATAAGCAGGACAGAGGATTTGCTCTGGACAGAGATGGAAGAGCCGGGAACA |
| | | | GAGAAGTGTGGGGAAGAGATAGGAACCAGCAGGATGGCAGGGGCAAAGGGCTC |
| | | | AAGGGTGAGGAGGCCAGTGGGACCCCACAGAGTTGGGGAGATAAAGGAACATT |
| | | | GGTTGCTTTGGTGGCACGTAAGCTCCTTGTCTGTCTCCAGCACCCAGAATCTCA |
| | | | TTAAAGCTTATTTATTGTACCTCCAGCGGCTGTGTGCAATGGGGTCTTTTGTGG |
| | | | AAATCAAGGAGCAGACAGGTTTCATGTGTACTGTCACCACGTGGGATGGAACCA |
| | | | GAGGCATGGAAGCAAGACGCTAAATGAAGAGGGCCATAAGG |
| | | | GCTGGGATTCCCAGGCACCTTAGGAACAGCTTGTCTTTTTTTTTTTCCTCTCCAA |
| | | | AAAAAATGTTTAAGGGACGGTGTCTCCTGTCACCCAGGCTGGAGTGCAATGGCA |
| | | | CGATCATAGCTCATTGCAGCCTCTAACTCCGGGGCTCAAGCAATCCTCCCACCTC |
| | | | AGCCTACCAAGTAGCTGTGACCACAGCTGCCCCTCACCATGCTAAGCTAATTTTT |
| | | | TTAATTAGATAGTACATAAACGTCCCAAAATTAGAAGATAAAAAGACATGAGGGA |
| | | | TCCATTCTAATTTGTGTTTGGAGTGTAATGGTCCAGCTCCATTCTTCTGCACATG |
| | | | GATATCCAGTTTTACACAACACTGTGAATGTAATGAATGCCACTGAATCATACAC |
| | | | TCAAAAATAGCTAAAATGGCAAATTGTCTGTTATCTCTTTTTAACCACCATTTTT |
| | | | GAAAATTAATTATACCAAAAAACCATTGAATAGTGCATTTTATTTATTTATTTATT |
| | | | TGTTTATTTATTTATTTATTTTAGAAATAAGAGTCTCACTTTGTTGCCCAGGCTG |
| | | | GAGTGCAGTGGCGTGATCATGGCTCATTGCAGCCTCGACCTGCTGGGCTCGGG |
| | | | CTATCCTTCCATCTCAGCCTCCCGAGTAGCTGGGACTATAGGTGGGCGCCACCC |
| | | | CACCTGGCTAAATCTCTTTTTAACTTTTGTAGAGATAGGCATCTCGCTATGTTGC |
| | | | CTAGGCTGGGCTGGAACTCCTGGGCTCAAGTGCTCCTCCTGATTGGCCTCCCA |
| | | | AAGCGCTAGGATTACAGATGTGAGCCACCGCGCCCACCCTGAACCTTACTTTTTT |
| | | | TGCTCAGTTTCTGGTAATTCAGAGAATGCCTCCTGAGTTGTTCTACACCCACCTC |
| | | | ATATTCCATGGGAGGGCTGTACAGGGCTTTTTTAACGAGGCCTCTAAGGACAGG |
| | | | CATTTGTATCCTTTCCAGCCTTTCACTATTACAATGTTGTAGTGAATAACTTTAC |
| | | | ACACTGTCATTTATTTTACTTTTTTTTTTTTTTATTTTAGAGAAAGGAATCAAGCC |
| | | | ATCTTGCCCAGGCTGGTCTCAAATTCCTGGGCCCAAACAATCCTCCCGCCTTGG |
| | | | CCTCCTAAAGTACTGGGATTTATAGGCATAAGCCACCGTGCCTGGCCAATGCAC |
| | | | ACTGTCATTTAGCTCATGTTAACACCTGAGTGTAGGACACACTCCTGGAGGTGG |
| | | | AATTGCTGGGCCAAAGAGTATGTTTCTTGTCATTGTGATAGATATTGACAAATG |
| | | | AACCCTCACAGAAGTTGTGCTGAGTTCTGTTCCCACCAGCGACGTAGGCGATGA |
| | | | CCTTTTTCTGGAGGGAGGGGGCATCCTTGGAGTCCACAGAGCCAGGAATGGAG |
| | | | AGTGGGCCCAGAATTTTGGTATAGGTGTTGTATAAACTTATAGTAAGGTTAAGA |
| | | | AAACCGCAACTATCCTTATCAGAGACTTGGCGGGGGGCAGGGTATGATGGAGAT |
| | | | CATAAGGAGGCTAAAACACTCCACACCCTCCCTCTGCATTGCTCCTGCACGGGA |
| | | | GTCGGGAATCTTTTCAGGTTGATACGATCTCACCTTGAGGAGCTGTGAGGTCCC |
| | | | AGAAGCCTCTGGGTTGCAGATTGCTTGGGGTGAAAATGTCTGTGCTACTGAAAT |
| | | | CTAACTTTTTACAAAAAATTACGGGCTGGGCGCAGTGGCTCACGCCTGTAATCC |
| | | | CAGCACTTTGGGAGGCTGCAGCGGGTGGATCACTTGAGGTAAGGAGTTCAAGA |
| | | | CCAGACCATAGTGAAACCGTGTCTCTACAAAAAAAATTAGCCAGGTGTGGTGGT |
| | | | GCATGCTTGTAATCCCAGCTACTCAGAAGGCTGAGGTGGGAGAATCCCTTGAAC |
| | | | CCGGGAAGTGGAGGCTGGAGTAAACCATGATCGAGTTACTGCACTCCAGCCTGG |
| | | | GTGACAAGAGTGAGACTCTGTCTCCAAAAAAAAAAAAAAAAAAAAAAAAACTGGA |
| | | | TTGCCTGGCTCTACTCCGGGCACAGCATGCAGGCCCAGTTCTGCTGCTCTGCTG |
| | | | TTTGTTCTGCTTTCCTCCACATATTGGCATCACCCTCTGGTGCCAAGATGGCTGC |
| | | | TGCATTCCAGGCATCACATCCAGACTCAGACCCAGAGAAGCTGCCCATCCCTACC |
| | | | TGGGTGAGCCTTTGTAGGAACGAGAAACCGCATCCAGCAGCAGAAACCTCACCC |
| | | | AGCAGCGTCTTTTCCGGTCTCATTCACCAGCGCCGCCCACCGCTCAACCAATCCC |
| | | | TGGCCAAAAGAATGGGACCGCCTGGAAGGCTGGACCAAACAGGACCTGCCCTCT |
| | | | GGGGCTGGGGAGAGGCCCAGATGAAGGCTGCAGGACAGGATGGACTCCTAGAC |
| | | | CTCTGTTACCAGCAGTGACTACCTCTGTCTGGGTGGTTGGAACATGTTTGAATT |
| | | | TTATTCTAAGTACTGTCTACAAGTTCTGCAATAAACCTTGACTCTTCTTTTAATA |
| | | | ATGCAAA |
| 570 | Human CD155 | Human CD155 Variant delta | MARAMAAAWPLLLVALLVLSWPPPGTGDVVVQAPTQVPGFLGDSVTLPCYLQVPN |
| | | amino acid sequence | MEVTHVSQLTVVARHGESGSMAVFHQTQGPSYSESKRLEFVAARLGAELRNASLRM |
| | | NCBI accession number: | FGLRVEDEGNYTCLFVTFPQGSRSVDIWLRVLAKPQNTAEVQKVQLTGEPVPMAR |
| | | NM_001135770.3 | CVSTGGRPPAQITWHSDLGGMPNTSQVPGFLSGTVTVTSLWILVPSSQVDGKNVT |
| | | Uniprot accession number: | CKVEHESFEKPQLLTVNLIVYYPPEVSISGYDNNWYLGQNEATLTCDARSNPEPTG |
| | | P15151-4 | YNWSTTMGPLPPFAVAQGAQLLIRPVDKPINTTLICNVTNALGARQAELTVQVKEG |
| | | Differs from P15151-1 (Seq ID | PPSEHSGISRNAIIFLVLGILVFLILLGIGIYFYWSKCSREVLWHCHLCPSSEHHQSC |
| | | No: 565): | RN |
| | | 385-392: TEHASASA → | |
| | | EHHQSCRN | |
| | | 393-417: Missing | |
| | | Differs from NM_001135770.3 | |
| | | 340 M → I | |
| 571 | Human CD155 | Nucleotide sequence encoding | AGCGGGACTGAGCGCCGGGAGAGACCTGCGCAGGCGCAGGCGCGCGGGGAGG |
| | | human CD155 Variant delta | GCCAGCCTGGGTGGCCCACCCCGCGCCTGGCGGGACTGGCCGCCAACTCCCCTC |
| | | NCBI accession number: | CGCTCCAGTCACTTGTCTGGAGCTTGAAGAAGTGGGTATTCCCCCTTCCCACCCC |
| | | NM_001135770. 3 | AGGCACTGGAGGAGCGGCCCCCCGGGGATTCCAGGACCTGAGCTCCGGGAGCT |
| | | | GGACTCGCAGCGACCGCGGCAGAGCGAGCGGGCGCCGGGAAGCGAGGAGACGC |
| | | | CCGCGGGAGGCCCAGCTGCTCGGAGCAACTGGCATGGCCCGAGCCATGGCCGC |
| | | | CGCGTGGCCGCTGCTGCTGGTGGCGCTACTGGTGCTGTCCTGGCCACCCCCAG |
| | | | GAACCGGGGACGTCGTCGTGCAGGCGCCCACCCAGGTGCCCGGCTTCTTGGGC |
| | | | GACTCCGTGACGCTGCCCTGCTACCTACAGGTGCCCAACATGGAGGTGACGCAT |
| | | | GTGTCACAGCTGACTTGGGCGCGGCATGGTGAATCTGGCAGCATGGCCGTCTTC |
| | | | CACCAAACGCAGGGCCCCAGCTATTCGGAGTCCAAACGGCTGGAATTCGTGGCA |
| | | | GCCAGACTGGGCGCGGAGCTGCGGAATGCCTCGCTGAGGATGTTCGGGTTGCG |
| | | | CGTAGAGGATGAAGGCAACTACACCTGCCTGTTCGTCACGTTCCCGCAGGGCAG |
| | | | CAGGAGCGTGGATATCTGGCTCCGAGTGCTTGCCAAGCCCCAGAACACAGCTGA |
| | | | GGTTCAGAAGGTCCAGCTCACTGGAGAGCCAGTGCCCATGGCCCGCTGCGTCTC |
| | | | CACAGGGGGTCGCCCGCCAGCCCAAATCACCTGGCACTCAGACCTGGGCGGGAT |
| | | | GCCCAATACGAGCCAGGTGCCAGGGTTCCTGTCTGGCACAGTCACTGTCACCAG |
| | | | CCTCTGGATATTGGTGCCCTCAAGCCAGGTGGACGGCAAGAATGTGACCTGCAA |
| | | | GGTGGAGCACGAGAGC |
| | | | TTTGAGAAGCCTCAGCTGCTGACTGTGAACCTCACCGTGTACTACCCCCCAGAG |
| | | | GTATCCATCTCTGGCTATGATAACAACTGGTACCTTGGCCAGAATGAGGCCACC |
| | | | CTGACCTGCGATGCTCGCAGCAACCCAGAGCCCACAGGCTATAATTGGAGCACG |
| | | | ACCATGGGTCCCCTGCCACCCTTTGCTGTGGCCCAGGGCGCCCAGCTCCTGATC |
| | | | CGTCCTGTGGACAAACCAATCAACACAACTTTAATCTGCAACGTCACCAATGCCC |
| | | | TAGGAGCTCGCCAGGCAGAACTGACCGTCCAGGTCAAAGAGGGACCTCCCAGTG |
| | | | AGCACTCAGGCATGTCCCGTAACGCCATCATCTTCCTGGTTCTGGGAATCCTGG |
| | | | TTTTTCTGATCCTGCTGGGGATCGGGATTTATTTCTATTGGTCCAAATGTTCCCG |
| | | | TGAGGTCCTTTGGCACTGTCATCTGTGTCCCTCGAGTGAGCATCACCAGAGCTG |
| | | | CCGTAATTGAGCACCTACTACGGGCTCTGTGCTGAGTCCTTCCAGTGTGCCTCT |
| | | | CACTGAATCCTCACCCCACTGCCATGAGGTTTCCCCCATTTGACTGATGAGGGT |
| | | | GCAGAGCCAGGGAGCCTTGTTCACTGGTTCATTGATTACATTTACAAATATTATT |
| | | | TACAGAGTGGGA |
| 572 | Human CD155 | Human CD155 optimised | ATGGGGTGGTCTTGTATCATACTGTTTCTTGTGGCAACCGCAACTGGTGTGCAT |
| | | nucleotide sequence for | TCTGGAGACGTAGTGGTCCAGGCTCCTACACAGGTCCCCGGCTTCCTTGGTGAT |
| | | expression of extracellular | AGCGTCACTCTCCCTTGTTACCTGCAGGTGCCAAATATGGAGGTCACTCACGTG |
| | | domain | AGCCAACTCACCTGGGCACGGCATGGGGAAAGTGGATCTATGGCAGTTTTCCAC |
| | | | CAAACTCAGGGGCCATCTTACTCCGAGTCCAAACGGTTGGAGTTTGTCGCTGCA |
| | | | AGACTGGGCGCCGAGCTCCGTAACGCATCACTCCGTATGTTTGGGCTGAGAGTT |
| | | | GAAGATGAAGGAAACTATACATGCCTGTTCGTGACATTTCCCCAGGGGTCTCGG |
| | | | TCCGTCGACATCTGGTTGCGAGTGCTTGCCAAACCACAGAACACAGCAGAAGTG |
| | | | CAGAAAGTGCAGCTCACTGGGGAACCCGTGCCAATGGCCAGGTGTGTTTCCACC |
| | | | GGTGGCCGTCCTCCAGCACAGATCACCTGGCACTCAGATCTGGGCGGCATGCCT |
| | | | AACACAAGTCAGGTGCCTGGCTTTCTTAGCGGCACTGTGACTGTGACATCTCTG |
| | | | TGGATCCTGGTGCCTTCTAGTCAAGTAGACGGAAAGAACGTAACTTGTAAAGTG |
| | | | GAACATGAGAGCTTCGAAAAGCCCCAGTTGCTTACAGTTAACCTCACTGTGTACT |
| | | | ATCCCCCAGAGGTCTCAATCTCCGGCTATGATAACAACTGGTACCTTGGGCAAA |
| | | | ACGAAGCCACACTGACTTGCGACGCACGGTCCAACCCAGAGCCCACAGGATATA |
| | | | ACTGGAGTACTACCATGGGCCCACTTCCTCCCTTCGCAGTGGCCCAAGGCGCTC |
| | | | AGCTGCTGATCCGTCCAGTGGATAAGCCTATTAACACTACACTGATTTGCAATGT |
| | | | TACAAACGCCCTCGGAGCTCGACAAGCAGAATTGACCGTGCAGGTTAAAGAGGG |
| | | | ACCCCCTTCCGAACACAGCGGCATGTCCAGGAAC |
| 573 | Human CD155- | Human CD155-Flag/His amino | MGWSCIILFLVATATGVHSGDVVVQAPTQVPGFLGDSVTLPCYLQVPNMEV |
| | Flag/His | acid sequence | THVSQLTWARHGESGSMAVFHQTQGPSYSESKRLEFVAARLGAELRNAS |
| | | NCBI accession number: | LRMFGLRVEDEGNYTCLFVTFPQGSRSVDIWIRVLAKPQNTAEVQKVQL |
| | | AAH15542.1 | TGEPVPMARCVSTGGRPPAQITWHSDLGGMPNTSQVPGFLSGTVTVTSL |
| | | Protein domains annotated as | WILVPSSQVDGKNVTCKVEHESFEKPQLLTVNLTVYYPPEVSISGYDNN |
| | | follows: Campath leader (double | WYLGQNEATLTCDARSNPEPTGYNWSTTMGPLPPFAVAQGAQLLIRPV |
| | | line), extracellular domain | DKPINTTLICNVTNALGARQAELTVQVKEGPPSEHSGMSRNIEGRDYKDD |
| | | (Gly 27 to Asn 343 as per full | DDKHHHHHH |
| | | length sequence) (bold), linker | |
| | | and Flag/His tag (italic) | |
| 574 | Human CD155-Fc | Human CD155-Fc amino acid | MGWSCIILFLVATATGVHSGDVVVQAPTQVPGFLGDSVTLPCYLQVPNMEV |
| | | sequence | THVSQLTWARHGESGSMAVFHQTQGPSYSESKRLEFVAARLGAELRNAS |
| | | NCBI accession number: | LRMFGLRVEDEGNYTCLFVTFPQGSRSVDIWLRVLAKPQNTAEVQKVQL |
| | | AAH15542.1 | TGEPVPMARCVSTGGRPPAQITWHSDLGGMPNTSQVPGFLSGTVIVTSL |
| | | Protein domains annotated as | WILVPSSQVDGKNVTCKVEHESFEKPQLLTVNLTVYYPPEVSISGYDNN |
| | | follows: Campath leader (double | WYLGQNEATLTCDARSNPEPTGYNWSTTMGPLPPFAVAQGAQLLIRPV |
| | | line), extracellular domain | DKPINTTLICNVTNALGARQAELTVQVKEGPPSEHSGMSRNIEGREPKSCD |
| | | (Gly 27 to Asn 343 as per full | KTHTCPPCPAPELLGGPSVFLFPPKPKDTLMISRTPEVTCWVDVSHEDPEVKFNWY |
| | | length sequence) (bold), linker | VDGVEVHNAKTKPREEQYNSTYRWSVLTVLHQDWLNGKEYKCKVSNKALPAPIE |
| | | and Fc tag (italics) | KTISKAKGQPREPQVYTLPPSRDELTKNQVSLTCLVKGFYPSDIAVEWESNGQPEN |
| | | | NYKTTPPVLDSDGSFFLYSKLTVDKSRWQQGNVFSCSVMHEALHNHYTQKSLSLS |
| | | | PGK |
| 575 | Human CD155-His | Human CD155-His amino acid | GDVVVQAPTQVPGFLGDSVTLPCYLQVPNMEVTHVSQLTWARHGESGSMAVFHQ |
| | R&D 2530-CD | sequence | TQGPSYSESKRLEFVAARLGAELRNASLRMFGLRVEDEGNYTCLFVTFPQGSRSVDI |
| | | NCBI accession number: | WLRVLAKPQNTAEVQKVQLTGEPVPMARCVSTGGRPPAQITWHSDLGGMPNTSQ |
| | | AAH15542 (His-tag not shown) | VPGFLSGTVIVTSLWILVPSSQVDGKNVTCKVEHESFEKPQLLTVNLTVYYPPEVSI |
| | | Expressed protein Gly-Asn | SGYDNNWYLGQNEATLTCDARSNPEPTGYNWSTTMGPLPPFAVAQGAQLLIRPV |
| | | 343 as per full length sequence. | DKPINTTLICNVTNALGARQAELTVQVKEGPPSEHSGMSRN |
| 576 | Human CD112 | Human CD112 Variant delta | MARAAALLPSRSPPTPLLWPLLLLLLLETGAQDVRVQVLPEVRGQLGGTVELPC |
| | | amino acid sequence | HLLPPVPGLYISLVTWQRPDAPANHQNVAAFHPKMGPSFPSPKPGSERL |
| | | NCBI accession number: | SFVSAKQSTGQDTEAELQDATLALHGLTVEDEGNYTCEFATFPKGSVRG |
| | | NM_001042724.1 | MTWIRVIAKPKNQAEAQKVTFSQDPTTVALCISKEGRPPARISWLSSLD |
| | | Uniprot accession number: | WEAKETQVSGTLAGTVTVISRFTLVPSGRADGVTVICKVEHESFEEPALI |
| | | Q92692-1 | PVTLSVRYPPEVSISGYDDNWYLGRTDATLSCDVRSNPEPTGYDWSTTS |
| | | Protein domains annotated as | GTFPTSAVAQGSQLVIHAVDSLFNTTFVCTVTNAVGMGRAEQVIFVRETP |
| | | follows: | NTAGAGATGGIIGGIIAAIIATAVAATGILICRQQRKEQTLQGAEEDEDLEGPPSY |
| | | Signal peptide (double line), | KPPTPKAK |
| | | extracellular domain (bold), | LEAQEMPSQLFTLGASEHSPLKTPYFDAGASCTEQEMPRYHELPTLEERSGPLHPG |
| | | transmembrane domain (italic) | ATSLGSPIPVPPGPPAVEDVSLDLEDEEGEEEEEYLDKINPIYDALSYSSPSDSYQGK |
| | | and cytoplasmatic domain | GFVMSRAMYV |
| | | (underlined) | |
| 577 | Human CD112 | Nucleotide sequence encoding | AGAATTCTTTGGCAGGGGCGACCTTAGAATCCTGGGGAGGAGCGAGAATGGAA |
| | | human CD112 Variant delta | TCCCGGGGAGGAACAGGGGTGGAATCCGGGGGGCGGGGTCAGAACGCCAGGA |
| | | NCBI accession number: | GGGGGCGGGGCCGGAGCCAGGGTCGGCTTGACTCGGGGGAGCAGCGGGTGGA |
| | | NM_001042724.1 | TCCTGTGACGTCAGCGGGTTCGAACCGCCGGAGCTGAGCGAGAGGCCGGGGGT |
| | | | GCCGAGCCGGGCGGGGAGAGCTGGGCCGGGAGAGCAGAACAGGGAGGCTAGA |
| | | | GCGCAGCGGGAACCGGCCCGGAGCCGGAGCCGGAGCCCCACAGGCACCTACTA |
| | | | AACCGCCCAGCCGATCGGCCCCCACAGAGTGGCCCGCGGGCCTCCGGCCGGGC |
| | | | CCAGTCCCCTCCCGGGCCCTCCATGGCCCGGGCCGCTGCCCTCCTGCCGTCGAG |
| | | | ATCGCCGCCGACGCCGCTGCTGTGGCCGCTGCTGCTGCTGCTGCTCCTGGAAAC |
| | | | CGGAGCCCAGGATGTGCGAGTTCAAGTGCTACCCGAGGTGCGAGGCCAGCTCG |
| | | | GGGGCACCGTGGAGCTGCCGTGCCACCTGCTGCCACCTGTTCCTGGACTGTACA |
| | | | TCTCCCTGGTGACCTGGCAGCGCCCAGATGCACCTGCGAACCACCAGAATGTGG |
| | | | CCGCCTTCCACCCTAAGATGGGTCCCAGCTTCCCCAGCCCGAAGCCTGGCAGCG |
| | | | AGCGGCTGTCCTTCGTCTCTGCCAAGCAGAGCACTGGGCAAGACACAGAGGCAG |
| | | | AGCTCCAGGACGCCACGCTGGCCCTCCACGGGCTCACGGTGGAGGACGAGGGC |
| | | | AACTACACTTGCGAGTTTGCCACCTTCCCCAAGGGGTCCGTCCGAGGGATGACC |
| | | | TGGCTCAGAGTCATAGCCAAGCCCAAGAACCAAGCTGAGGCCCAGAAGGTCACG |
| | | | TTCAGCCAGGACCCTACGACAGTGGCCCTCTGCATCTCCAAAGAGGGCCGCCCA |
| | | | CCTGCCCGGATCTCCTGGCTCTCATCCCTGGACTGGGAAGCCAAAGAGACTCAG |
| | | | GTGTCAGGGACCCTGGCCGGAACTGTCACTGTCACCAGCCGCTTCACCTTGGTG |
| | | | CCCTCGGGCCGAGCAGATGGTGTCACGGTCACCTGCAAAGTGGAGCATGAGAG |
| | | | CTTCGAGGAACCAGCCCTGATACCTGTGACCCTCTCTGTACGCTACCCTCCTGAA |
| | | | GTGTCCATCTCCGGCTATGATGACAACTGGTACCTCGGCCGTACTGATGCCACC |
| | | | CTGAGCTGTGACGTCCGCAGCAACCCAGAGCCCACGGGCTATGACTGGAGCACG |
| | | | ACCTCAGGCACCTTCCCGACCTCCGCAGTGGCCCAGGGCTCCCAGCTGGTCATC |
| | | | CACGCAGTGGACAGTCTGTTCAATACCACCTTCGTCTGCACAGTCACCAATGCC |
| | | | GTGGGCATGGGCCGCGCTGAGCAGGTCATCTTTGTCCGAGAGACCCCCAACACA |
| | | | GCAGGCGCAGGGGCCACAGGCGGCATCATCGGGGGCATCATCGCCGCCATCAT |
| | | | TGCTACTGCTGTGGCTGCCACGGGCATCCTTATCTGCCGGCAGCAGCGGAAGGA |
| | | | GCAGACGCTGCAGGGGGCAGAGGAGGACGAAGACCTGGAGGGACCTCCCTCCT |
| | | | ACAAGCCACCGACCCCAAAAGCGAAGCTGGAGGCACAGGAGATGCCCTCCCAGC |
| | | | TCTTCACTCTGGGGGCCTCGGAGCACAGCCCACTCAAGACCCCCTACTTTGATG |
| | | | CTGGCGCCTCATGCACTGAGCAGGAAATGCCTCGATACCATGAGCTGCCCACCT |
| | | | TGGAAGAACGGTCAGGACCCTTGCACCCTGGAGCCACAAGCCTGGGGTCCCCCA |
| | | | TCCCGGTGCCTCCAGGGCCACCTGCTGTGGAAGACGTTTCCCTGGATCTAGAGG |
| | | | ATGAGGAGGGGGAGGAGGAGGAAGAGTATCTGGACAAGATCAACCCCATCTAT |
| | | | GATGCTCTGTCCTATAGCAGCCCCTCTGATTCCTACCAGGGCAAAGGCTTTGTC |
| | | | ATGTCCCGGGCCATGTATGTGTGAGCTGCCATGCGCCTGGCGTCTCACATCTCA |
| | | | CCTGTTGATCCCTTAGCTTTCTTGCCAAGGATCTAGTGCCCCCTGACCTCTGGCC |
| | | | AGGCCACTGTCAGTTAACACATATGCATTCCATTTGTGATGTCTACCTTGGTGGC |
| | | | TCCACTATGACCCCTAACCCATGAGCCCAGAGAAATTCACCGTGATAATGGAATC |
| | | | CTGGCAACCTTATCTCATGAGGCAGGAGGTGGGGAAGGTGCTTCTGCACAACCT |
| | | | CTGATCCCAAGGACTCCTCTCCCAGACTGTGACCTTAGACCATACCTCTCACCCC |
| | | | CCAATGCCTCGACTCCCCCAAAATCACAAAGAAGACCCTAGACCTATAATTTGTC |
| | | | TTCAGGTAGTAAATTCCCAATAGGTCTGCTGGAGTGGGCGCTGAGGGCTCCCTG |
| | | | CTGCTCAGACCTGAGCCCTCCAGGCAGCAGGGTCCCACTTACCCCCTCCCCACC |
| | | | CTGTTCCCCAAAGGTGGGAAAGAGGGGATTCCCCAGCCCAAGGCAGGGTTTTCC |
| | | | CAGCACCCTCCTGTAAGCAGAAGTCTCAGGGTCCAGACCCTTCCCTGAGCCCCC |
| | | | ACCCCCACCCCAATTCCTGCCTACCAAGCAAGCAGCCCCAGCCTAGGGTCAGACA |
| | | | GGGTGAGCCTCATACAGACTGTGCCTTGATGGCCCCAGCCTTGGGAGAAGAATT |
| | | | TACTGTTAACCTGGAAGACTACTGAATCATTTTACCCTTGCCCAGTGGAATAGGA |
| | | | CCTAAACATCCCCCTTCCGGGGAAAGTGGGTCATCTGAATTGGGGGTAGCAATT |
| | | | GATACTGTTTTGTAAACTACATTTCCTACAAAATATGAATTTATACTTTGACCAG |
| | | | GAAAAAAAAAAAAA |
| 578 | Human CD112 | Human CD112 Variant alpha | MARAAALLPSRSPPTPLLWPLLLLLLLETGAQDVRVQVLPEVRGQLGGTVELPCHLL |
| | | amino acid sequence | PPVPGLYISLVTVVQRPDAPANHQNVAAFHPKMGPSFPSPKPGSERLSFVSAKQSTG |
| | | NCBI accession number: | QDTEAELQDATLALHGLTVEDEGNYTCEFATFPKGSVRGMTWLRVIAKPKNQAEA |
| | | NM_002856.2 | QKVTFSQDPTTVALCISKEGRPPARISWLSSLDWEAKETQVSGTLAGTVTVTSRFT |
| | | Uniprot accession number: | LVPSGRADGVTVTCKVEHESFEEPALIPVTLSVRYPPEVSISGYDDNWYLGRTDATL |
| | | Q92692-2 | SCDVRSNPEPTGYDWSTTSGTFPTSAVAQGSQLVIHAVDSLFNTTFVCTVTNAVG |
| | | Differs from sequence Q92692-1 | MGRAEQVIFVRETPRASPRDVGPLVWGAVGGILLVLLLLAGGSLAFILLRVRRRRKS |
| | | 351-479: | PGGAGGGASGDGGFYDPKAQVLGNGDPVFWTPVVPGPMEPDGKDEEEEEEEEKA |
| | | NTAGAGATGG...GATSLGSPIP → | EKGLMLPPPPALEDDMESQLDGSLISRRAVYV |
| | | RASPRDVGPL...SLISRRAVYV | |
| | | 480-538: Missing | |
| 579 | Human CD112 | Nucleotide sequence encoding | AGAATTCTTTGGCAGGGGCGACCTTAGAATCCTGGGGAGGAGCGAGAATGGAA |
| | | human CD112 Variant alpha | TCCCGGGGAGGAACAGGGGTGGAATCCGGGGGGCGGGGTCAGAACGCCAGGA |
| | | NCBI accession number: | GGGGGCGGGGCCGGAGCCAGGGTCGGCTTGACTCGGGGGAGCAGCGGGTGGA |
| | | NM_002856.2 | TCCTGTGACGTCAGCGGGTTCGAACCGCCGGAGCTGAGCGAGAGGCCGGGGGT |
| | | | GCCGAGCCGGGCGGGGAGAGCTGGGCCGGGAGAGCAGAACAGGGAGGCTAGA |
| | | | GCGCAGCGGGAACCGGCCCGGAGCCGGAGCCGGAGCCCCACAGGCACCTACTA |
| | | | AACCGCCCAGCCGATCGGCCCCCACAGAGTGGCCCGCGGGCCTCCGGCCGGGC |
| | | | CCAGTCCCCTCCCGGGCCCTCCATGGCCCGGGCCGCTGCCCTCCTGCCGTCGAG |
| | | | ATCGCCGCCGACGCCGCTGCTGTGGCCGCTGCTGCTGCTGCTGCTCCTGGAAAC |
| | | | CGGAGCCCAGGATGTGCGAGTTCAAGTGCTACCCGAGGTGCGAGGCCAGCTCG |
| | | | GGGGCACCGTGGAGCTGCCGTGCCACCTGCTGCCACCTGTTCCTGGACTGTACA |
| | | | TCTCCCTGGTGACCTGGCAGCGCCCAGATGCACCTGCGAACCACCAGAATGTGG |
| | | | CCGCCTTCCACCCTAAGATGGGTCCCAGCTTCCCCAGCCCGAAGCCTGGCAGCG |
| | | | AGCGGCTGTCCTTCGTCTCTGCCAAGCAGAGCACTGGGCAAGACACAGAGGCAG |
| | | | AGCTCCAGGACGCCACGCTGGCCCTCCACGGGCTCACGGTGGAGGACGAGGGC |
| | | | AACTACACTTGCGAGTTTGCCACCTTCCCCAAGGGGTCCGTCCGAGGGATGACC |
| | | | TGGCTCAGAGTCATAGCCAAGCCCAAGAACCAAGCTGAGGCCCAGAAGGTCACG |
| | | | TTCAGCCAGGACCCTACGACAGTGGCCCTCTGCATCTCCAAAGAGGGCCGCCCA |
| | | | CCTGCCCGGATCTCCTGGCTCTCATCCCTGGACTGGGAAGCCAAAGAGACTCAG |
| | | | GTGTCAGGGACCCTGGCCGGAACTGTCACTGTCACCAGCCGCTTCACCTGGTG |
| | | | CCCTCGGGCCGAGCAGATGGTGTCACGGTCACCTGCAAAGTGGAGCATGAGAG |
| | | | CTTCGAGGAACCAGCCCTGATACCTGTGACCCTCTCTGTACGCTACCCTCCTGAA |
| | | | GTGTCCATCTCCGGCTATGATGACAACTGGTACCTCGGCCGTACTGATGCCACC |
| | | | CTGAGCTGTGACGTCCGCAGCAACCCAGAGCCCACGGGCTATGACTGGAGCACG |
| | | | ACCTCAGGCACCTTCCCGACCTCCGCAGTGGCCCAGGGCTCCCAGCTGGTCATC |
| | | | CACGCAGTGGACAGTCTGTTCAATACCACCTTCGTCTGCACAGTCACCAATGCC |
| | | | GTGGGCATGGGCCGCGCTGAGCAGGTCATCTTTGTCCGAGAAACCCCCAGGGC |
| | | | CTCGCCCCGAGATGTGGGCCCGCTGGTGTGGGGGGCCGTGGGGGGGACACTGC |
| | | | TGGTGCTGCTGCTTCTGGCTGGGGGGTCCTTGGCCTTCATCCTGCTGAGGGTG |
| | | | AGGAGGAGGAGGAAGAGCCCTGGAGGAGCAGGAGGAGGAGCCAGTGGCGACG |
| | | | GGGGATTCTACGATCCGAAAGCTCAGGTGTTGGGAAATGGGGACCCCGTCTTCT |
| | | | GGACACCAGTAGTCCCTGGTCCCATGGAACCAGATGGCAAGGATGAGGAGGAG |
| | | | GAGGAGGAGGAAGAGAAGGCAGAGAAAGGCCTCATGTTGCCTCCACCCCCAGC |
| | | | ACTCGAGGATGACATGGAGTCCCAGCTGGACGGCTCCCTCATCTCACGGCGGGC |
| | | | AGTTTATGTGTGACCTGGACACAGACAGAGACAGAGCCAGGCCCGGCCCTCCCG |
| | | | CCCCCGACCTGACCACGCCGGCCTAGGGTTCCAGACTGGTTGGACTTGTTCGTC |
| | | | TGGACGACACTGGAGTGGAACACTGCCTCCCACTTTCTTGGGACTTGGAGGGAG |
| | | | GTGGAACAGCACACTGGACTTCTCCCGTCTCTAGGGCTGCATGGGGAGCCCGGG |
| | | | GAGCTGAGTAGTGGGGATCCAGAGAGGACCCCCGCCCCCAGAGACTTGGTTTTG |
| | | | GCTCCAGCCTTCCCCTGGCCCCGTGACACTCAGGAGTTAATAAATGCCTTGGAG |
| | | | GAAAACATCAAAAAAAAAAAAAAAA |
| 580 | Human CD113 | Human CD113 amino acid | MARTLRPSPLCPGGGKAQLSSASLLGAGLLLQPPIPPPLLLLLFPLLLFSRLCGALAG |
| | | sequence | PIIVEPHVTAVWGKNVSLKCLIEVNETITQISWEKIHGKSSQTVAVHHPQ |
| | | NCBI accession number: | YGFSVQGEYQGRVLFKNYSLNDATITLHNIGFSDSGKYICKAVTFPLGNA |
| | | NM_015480.2 | QSSTIVTVLVEPTVSLIKGPDSLIDGGNETVAAICIAATGKPVAHIDWEG |
| | | Uniprot accession number: | DLGEMESTTTSFPNETATIISQYKLFPTRFARGRRITCVVKHPALEKDIRY |
| | | Q9NQS3-1 | SFILDIQYAPEVSVTGYDGNWFVGRKGVNLKCNADANPPPFKSVWSRL |
| | | Protein domains annotated as | DGQWPDGLLASDNTLHFVHPLTFNYSGVYICKVTNSLGQRSDQKVIYIS |
| | | follows: | DPPTTTTLQPTIQWHPSTADIEDLATEPKKLPFPLSTLATIKDDTIATIIAS |
| | | Signal peptide (double line), | VVGGALFIVLVSVLAGFCYRRRRTFRGDYFAKNYIPPSDMQKESQIDVLQQDELDS |
| | | extracellular domain (bold), | YPDSVKKENKNPVNNLIRKDYLEEPEKTQWNNVENLNRFERPMDYYEDLKMGMKF |
| | | transmembrane domain (italic) | VSDEHYDENEDDLVSHVDGSVISRREWYV |
| | | and cytoplasmatic domain | |
| | | (underlined) | |
| 581 | Human CD113 | Nucleotide sequence encoding | ACGCGGGCGGGTGCCGAGGGGAGGGGAGTGGCGGCGGCGGCGGGCGGCTCCC |
| | | human CD113 | GCTTCAGCCTCGGCAGTGGCGTCGGCGACGGCGGTGTCGAGGCAGCCGCCAGC |
| | | NCBI accession number: | GTTCGGCCAAGTGTCAGCCGGCAGCGACGGCGCTAGAGCTGGGAGCTGGGGAC |
| | | NM_015480.2 | GCGCGCGCCGGACCTTCCACAGCCTCCGCCCAGAGCCTGAGGCGCCGGGGCCG |
| | | | GGGGAGCCGGGGGGCGGGCGGGCGAGCGGGCCGGGGGGAGGGTGGGGGATG |
| | | | GCGCGGACCCTGCGGCCGTCCCCGCTGTGTCCTGGAGGCGGCAAAGCACAACTT |
| | | | TCCTCCGCTTCTCTCCTCGGAGCCGGGCTCCTGCTGCAGCCCCCGACGCCACCT |
| | | | CCGCTGCTGCTGCTGCTCTTCCCGCTGCTGCTCTTCTCCAGGCTCTGTGGTGCC |
| | | | TTAGCTGGACCAATTATTGTGGAGCCACATGTCACAGCAGTATGGGGAAAGAAT |
| | | | GTTTCATTAAAGTGTTTAATTGAAGTAAATGAAACCATAACACAGATTTCATGGG |
| | | | AGAAGATACATGGCAAAAGTTCACAGACTGTTGCAGTTCACCATCCCCAATATG |
| | | | GATTCTCTGTTCAAGGAGAATATCAGGGAAGAGTCTTGTTTAAAAATTACTCACT |
| | | | TAATGATGCAACAATTACTCTGCATAACATAGGATTCTCTGATTCTGGAAAATAC |
| | | | ATCTGCAAAGCTGTTACATTCCCGLCTTGGAAATGCCCAGTCCTCTACAACTGTAA |
| | | | CTGTGTTAGTTGAACCCACTGTGAGCCTGATAAAAGGGCCAGATTCTTTAATTG |
| | | | ATGGAGGAAATGAAACAGTAGCAGCCATTTGCATCGCAGCCACTGGAAAACCCG |
| | | | TTGCACATATTGACTGGGAAGGTGATCTTGGTGAAATGGAATCCACTACAACTT |
| | | | CTTTTCCAAATGAAACGGCAACGATTATCAGCCAGTACAAGCTATTTCCAACCAG |
| | | | ATTTGCTAGAGGAAGGCGAATTACTTGTGTTGTAAAACATCCAGCCTTGGAAAA |
| | | | GGACATCCGATACTTTTTCATATTAGACATACAGTATGCTCCTGAAGTTTCGGTA |
| | | | ACAGGATATGATGGAAATTGGTTTGTAGGAAGAAAAGGTGTTAATCTCAAATGT |
| | | | AATGCTGATGCAAATCCACCACCCTTCAAATCTGTGTGGAGCAGGTTGGATGGA |
| | | | CAATGGCCTGATGGTTTATTGGCTTCAGACAATACTCTTCATTTTGTCCATCCAT |
| | | | TGACTTTCAATTATTCTGGTGTTTATATCTGTAAAGTGACCAATTCCCTTGGTCA |
| | | | AAGAAGTGACCAAAAAGTCATCTACATTTCAGATCCTCCTACTACTACCACCCTT |
| | | | CAGCCTACAATTCAGTGGCATCCCTCAACTGCTGACATCGAGGATCTAGCAACA |
| | | | GAACCTAAAAAATTGCCCTTCCCATTGTCAACTTTGGCAACAATTAAGGATGACA |
| | | | CAATTGCCACGATCATTGCTAGTGTAGTGGGTGGGGCTCTCTTCATAGTACTTG |
| | | | TAAGTGTTTTGGCTGGAATATTCTGCTATAGGAGAAGACGGACGTTTCGTGGAG |
| | | | ACTACTTTGCCAAGAACTACATTCCACCATCAGATATGCAAAAAGAATCACAAAT |
| | | | AGATGTTCTTCAACAAGATGAGCTTGATTCTTACCCAGACAGTGTAAAAAAAGAA |
| | | | AACAAAAATCCAGTGAACAATCTAATACGTAAAGACTATTTAGAAGAGCCTGAAA |
| | | | AAACTCAGTGGAACAATGTAGAAAATCTCAATAGGTTTGAAAGACCAATGGATT |
| | | | ATTATGAAGATCTAAAAATGGGAATGAAGTTTGTCAGTGATGAACATTATGATG |
| | | | AAAACGAAGATGACTTAGTTTCACATGTAGATGGTTCCGTAATTTCCAGGAGGG |
| | | | AGTGGTATGTTTAGCAACCACTGAATGTGACTTAACTATGTACAATGTTCATTCA |
| | | | CACTAGTTGATCATTTTCAGATTGTTCATACTTTTTCTTGAGGAAGAATAAGCTT |
| | | | TTTCAAGTTGATTTTCAAGCTTACTTTTTATATTCTAATCTGACAAATGAAAATG |
| | | | TAAAATCTGAGTTCAGTGTATCTAAGCTGCTTTACAATTTTTTTTCAATGCTGTA |
| | | | CTACTGTCTCAAGATTTAAATTTTAATGCAGAGTACTTTATTGGTGTGAGGCACA |
| | | | CAGGTAAGAAGAAATGTCAACATTAAATGTATGACTTACTTGGTACAAAAATTTT |
| | | | TTAAAAAGGGAACTACCTTGACATTGTGTATTAAATGTTTACCTAAGACTATAAT |
| | | | CTCAAGTATGATGTTTGTTTAACATATACCTCTCAAAATTTATCACCACTCAATG |
| | | | ACACTGCATCAAAATTGACTATAAAACTAATTCAAGAAATATTTATATATATTTTT |
| | | | TAATATACAAAAAATATTTAGCCTGATGGAATGGCTTTCCTTTTCAAACATTATT |
| | | | TTCTAAGTTTCTATACAAATGAAATCTTTACCTCTGCATATTAATGAGCCTTGCC |
| | | | ATAATTACTGTAGAGTGGCTTTTCAAAGATATTTTGTTGCACTAAAACTGTGGTA |
| | | | GTAAACTCAGTGAACATGATGTGTGGAAGAGCATAATTAGCTGGTCAATATTTT |
| | | | TGTCCAAAATACCTGCAAGAGTAATAAAATACATACCTTTCAAACATGATAATTA |
| | | | TTATTTTTTTTTTTCCTTTCTGGAACATGGATTTTGGTACATTAGCAGTAGCCT |
| | | | TATTTTAATGCTTTATGTCCTAAACATACTAATAGAAATGAAAAGACGCAGAGAG |
| | | | AGCATTTCGGAATACTGAAGTACTAGTTTTAGAAATGAGACTTTCAGCCAACAAT |
| | | | CTATAGAAAGAATTTTATGGACCATCTTGTTTTAGTTATTTAATGTTGATGTTGT |
| | | | TCAAATGGGTAAATGTACAGAAAGAAAATTTTAGAGTAAACTTGGAACTTTGGA |
| | | | TATAACTAGAAAAAACTAGATTATAGAATTAGTCGGTAACACTTGCTAATGGACA |
| | | | TTGGCATTCATCTCCTTTTTCCTCCTAAGTGTATGTATGTGTTTTAAGATTTCTG |
| | | | TTTTTACGATTAAAACTGGAAACATGAGGTTTTTTGTTTTTGTTTTTTACATAA |
| | | | TTACATATATTCCTTCTGAATCATTTATCTTTTGAGAAAGAAATGTTACCTAAAC |
| | | | TTCAAATGTGCTTTTTGTTTGTGAGGTAATTAAATTGCTTCTACAGTGGAGGCTT |
| | | | ACAAAATTATTGTGACAACTATTTTGAAGCTGAAAGGATAGTTTTTCTATTGCTA |
| | | | AGTCATTTGAAAAAGTGACCATTTTGCCAGTGAAATGAAGTGGAAGTTAGTAGG |
| | | | AGAATCATAAATTAAATATATTATTTTGTTAATAAAAAGGCAAAGTAGTAGGTAC |
| | | | TTTTTAAACCCTCCCAACCAGCCCTTTCTCAATATTCATCAAATCTAAAACATTTA |
| | | | GGGGGCAAAATTCTAACATGTTCATGGTATCTTGCAAATAGTGAAAGCTTTATTC |
| | | | TGAAGGATTATAAACTAGTTTTCTTCATTTTAACTAGCACTATTTTGTGGAAATT |
| | | | AGAAACCTCTTTTATTTCTCTTCCCAAAAGTAATACTTATTATAAGGCTGTAGTA |
| | | | TCAGGTTAAGGATACAGATAAATAAAGTTCACTTATATCTTCTTACAAATGTCTG |
| | | | GGTTTTAATATGGTTAATCACTTATATACAAATATTACAACTTTTTAGTGCAAGT |
| | | | TTTTGGAAGAAAACTTTTTGATAAAACACTGTGATTGATGTGACTTTATTTTTAA |
| | | | TTTAAACGATGAGGTGGCCAGAAGAAAGATGGGTCTAAAATTTCTCCCCATGAA |
| | | | AGATGTAAAACTATGGCTTTTTTTAAAATCAAAATTTCATCTTTTAAAATAATGG |
| | | | TTTGAAATACTGTATGGATCTGAACAGAATAATCACATTTAGGATTCTATATAAA |
| | | | TCTCAACTGGAGTATAATCTGAAGGAAATTAGCAGTGTATTTTAAGAAATATATT |
| | | | TCAAAAATATAAATACTGATTATGAACTTCCTTTTACATTGTGGTTATTTGTGCG |
| | | | ATTAGGTTTTTTTGTTTGTTTCTTTTGTGTTTGTTTGGCGGGAGAGGGTGACCT |
| | | | GGAAAGCCACAAGTGAGTATTTGACATATTCTGTATCCTTAATCCAATCATTTGG |
| | | | CAAACTAAAAGGTTTCTGTGTTGTAAGAATCTGATACTAGTGCTTAAGACTTTGG |
| | | | GAAGCATTGCACTGTTGTTTATTAGAACTTTATGTATATTTACTGTACATAGAGA |
| | | | CTTGTTTGAAAACATGAATAGTCATTAAATAAAGACATTGTTAAATTAGTTTTTG |
| | | | AATACCAGTGATATTCATAACTACTTGACAGGTATATATGAAAATTCTACTATCG |
| | | | TGAAAAAAAATGAATATTTGTACTATTTTTGGCCATATTTATATTTATTTCTTTCA |
| | | | TATGGTTTGAACTGTTTTAGCATTTTGTAAATTCACTTGAGAGTTTTCTTTCATA |
| | | | CTGGTTAAAATATTTCAATGATATAATGAAGATGAATGCAACTCTTATTTTTCTG |
| | | | CCATTTTTTATTAAAATACATTGAAACTAAAGTAGGCTCGGGGTTAACTTTAAAA |
| | | | GTGATATTTGAGAAGTGCTTTAGAGTTGAAAGATTTAGTATTTTACCACGTGCC |
| | | | TAGTAGGGTTCTATTTGCTAACTCTAATATTGAGGAAACTATTAAGGTTTTCAGT |
| | | | AGTAAGTGTTGCTTCTAATAGCCATATACAGGAAAGTTTTATAAGATAACCCACG |
| | | | GCTAAATATTTTGCATTAAGGAGCTGTAGGAGTACAGTGTATAAGTACAGAAAT |
| | | | TGAGAGAAATGTAGTCATTTTATATGTGAAAACATCTGATTTGAGTTTTTGATAA |
| | | | ATACTGCTAAAACACAGTATATGAACAAGTAAGAAGTTTATGTATGAAAGTAATC |
| | | | AATGTAAAATATAAGAAAGGAATAAATGGTACCCATTTTGAATTTTTAATTCTAA |
| | | | TAGGAGAGTAGATTGTAGATTGAATTGTCTTTCCTGTTTACTTGTTAATTAGAAA |
| | | | ATGCATCCTTCATAAACAGCTCCTTTCTCAAATTTTTTGTATATTGTGTTTGTGT |
| | | | TTGGGTTTTAGTTTGTACCCGCGCTAAGTTTTGGTTTTGTTGTGTTTGGTGTTT |
| | | | TTTGTTTTGTTTTCTTTTGTTTTGTTTTTTCTTTTTTAACCAACCTGTGTATTAG |
| | | | GTCTTAGCCCCAATAGCCATGCATGAAATCTTTAAATAAAAGTTAAAAAAGTTCT |
| | | | TTAGAGGCAAAAAAAAAAAA |
| 582 | Human CD113 | Human CD113 amino acid | MARTLRPSPLCPGGGKAQLSSASLLGAGLLLQPPIPPPLLLLLFPLLLFSRLCGALAG |
| | | sequence (alternative isoform) | PIIVEPHVTAVWGKNVSLKCLIEVNETITQISWEKIHGKSSQTVAVHHPQYGFSVQ |
| | | NCBI accession number: | GEYQGRVLFKNYSLNDATTTLHNIGFSDSGKYICKAVTFPLGNAQSSTTVTVLVEPT |
| | | NM_001243286.1 | VSLIKGPDSLIDGGNETVAAICIAATGKPVAHIDWEGDLGEMESTTTSFPNETATIIS |
| | | Uniprot accession number: | QYKLFPTRFARGRRITCVVKHPALEKDIRYSFILDIQYAPEVSVTGYDGNWFVGRKG |
| | | Q9NQS3-2 | VNLKCNADANPPPFKSVWSRLDGQWPDGLLASDNTLHFVHPLTFNYSGVYICKVT |
| | | Differs from sequence Uniprot | |
| | | NSLGQRSDQKVIYISAYNSVASLNC | |
| | | Q9NQS3-1 (Seq ID No: 580) | |
| | | 357-366: DPPTTTTLQP → | |
| | | AYNSVASLNC | |
| | | 367-549: Missing | |
| 583 | Human CD113 | Nucleotide sequence encoding | ACGCGGGCGGGTGCCGAGGGGAGGGGAGTGGCGGCGGCGGCGGGCGGCTCCC |
| | | human CD113 | GCTTTCAGCCTCGGCAGTGGCGTCGGCGACGGCGGTGTCGAGGCAGCCGCCAGC |
| | | NCBI accession number: | GTTCGGCCAAGTGTCAGCCGGCAGCGACGGCGCTAGAGCTGGGAGCTGGGGAC |
| | | NM_001243286.1 | GCGCGCGCCGGACCTTCCACAGCCTCCGCCCAGAGCCTGAGGCGCCGGGGCCG |
| | | | GGGGAGCCGGGGGGCGGGCGGGCGAGCGGGCCGGGGGGAGGGTGGGGGATG |
| | | | GCGCGGACCCTGCGGCCGTCCCCGCTGTGTCCTGGAGGCGGCAAAGCACAACTT |
| | | | TCCTCCGCTTCTCTCCTCGGAGCCGGGCTCCTGCTGCAGCCCCCGACGCCACCT |
| | | | CCGCTGCTGCTGCTGCTCTTCCCGCTGCTGCTCTTCTCCAGGCTCTGTGGTGCC |
| | | | TTAGCTGGACCAATTATTGTGGAGCCACATGTCACAGCAGTATGGGGAAAGAAT |
| | | | GTTTCATTAAAGTGTTTAATTGAAGTAAATGAAACCATAACACAGATTTCATGGG |
| | | | AGAAGATACATGGCAAAAGTTCACAGACTGTTGCAGTTCACCATCCCCAATATG |
| | | | GATTCTCTGTTCAAGGAGAATATCAGGGAAGAGTCTTGTTTAAAAATTACTCACT |
| | | | TAATGATGCAACAATTACTCTGCATAACATAGGATTCTCTGATTCTGGAAAATAC |
| | | | ATCTGCAAAGCTGTTACATTCCCGCTTGGAAATGCCCAGTCCTCTACAACTGTAA |
| | | | CTGTGTTAGTTGAACCCACTGTGAGCCTGATAAAAGGGCCAGATTCTTTAATTG |
| | | | ATGGAGGAAATGAAACAGTAGCAGCCATTTGCATCGCAGCCACTGGAAAACCCG |
| | | | TTGCACATATTGACTGGGAAGGTGATCTTGGTGAAATGGAATCCACTACAACTT |
| | | | CTTTTCCAAATGAAACGGCAACGATTATCAGCCAGTACAAGCTATTTCCAACCAG |
| | | | ATTTGCTAGAGGAAGGCGAATTACTTGTGTTGTAAAACATCCAGCCTTGGAAAA |
| | | | GGACATCCGATACTCTTTCATATTAGACATACAGTATGCTCCTGAAGTTTCGGTA |
| | | | ACAGGATATGATGGAAATTGGTTTGTAGGAAGAAAAGGTGTTAATCTCAAATGT |
| | | | AATGCTGATGCAAATCCACCACCCTTCAAATCTGTGTGGAGCAGGTTGGATGGA |
| | | | CAATGGCCTGATGGTTTATTGGCTTCAGACAATACTCTTCATTTTGTCCATCCAT |
| | | | TGACTTTCAATTATTCTGGTGTTTATATCTGTAAAGTGACCAATTCCCTTGGTCA |
| | | | AAGAAGTGACCAAAAAGTCATCTACATTTCAGCCTACAATTCAGTGGCATCCCTC |
| | | | AACTGCTGACATCGAGGATCTAGCAACAGAACCTAAAAAATTGCCCTTCCCATTG |
| | | | TCAACTTTGGCAACAATTAAGGATGACACAATTGCCACGATCATTGCTAGTGTAG |
| | | | TGGGTGGGGCTCTCTTCATAGTACTTGTAAGTGTTTTGGCTGGAATATTCTGCT |
| | | | ATAGGAGAAGACGGACGTTTCGTGGAGACTACTTTGCCAAGAACTACATTCCAC |
| | | | CATCAGATATGCAAAAAGAATCACAAATAGATGTTCTTCAACAAGATGAGCTTGA |
| | | | TTCTTACCCAGACAGTGTAAAAAAAGAAAACAAAAATCCAGTGAACAATCTAATA |
| | | | CGTAAAGACTATTTAGAAGAGCCTGAAAAAACTCAGTGGAACAATGTAGAAAAT |
| | | | CTCAATAGGTTTGAAAGACCAATGGATTATTATGAAGATCTAAAAATGGGAATG |
| | | | AAGTTTGTCAGTGATGAACATTATGATGAAAAC |
| | | | GAAGATGACTTAGTTTCACATGTAGATGGTTCCGTAATTTCCAGGAGGGAGTGG |
| | | | TATGTTTAGCAACCACTGAATGTGACTTAACTATGTACAATGTTCATTCACACTA |
| | | | GTTGATCATTTTCAGATTGTTCATACTTTTTCTTGAGGAAGAATAAGCTTTTTCA |
| | | | AGTTGATTTTCAAGCTTACTTTTTATATTCTAATCTGACAAATGAAAATGTAAAA |
| | | | TCTGAGTTCAGTGTATCTAAGCTGCTTTACAATTTTTTTTCAATGCTGTACTACT |
| | | | GTCTCAAGATTTAAATTTTAATGCAGAGTACTTTATTGGTGTGAGGCACACAGG |
| | | | TAAGAAGAAATGTCAACATTAAATGTATGACTTACTTGGTACAAAAATTTTTTAA |
| | | | AAAGGGAACTACCTTGACATTGTGTATTAAATGTTTACCTAAGACTATAATCTCA |
| | | | AGTATGATGTTTGTTTAACATATACCTCTCAAAATTTATCACCACTCAATGACAC |
| | | | TGCATCAAAATTGACTATAAAACTAATTCAAGAAATATTTATATATATTTTTTAAT |
| | | | ATACAAAAAATATTTAGCCTGATGGAATGGCTTTCCTTTTCAAACATTATTTTCT |
| | | | AAGTTTCTATACAAATGAAATCTTTACCTCTGCATATTAATGAGCCTTGCCATAA |
| | | | TTACTGTAGAGTGGCTTTTCAAAGATATTTTGTTGCACTAAAACTGTGGTAGTAA |
| | | | ACTCAGTGAACATGATGTGTGGAAGAGCATAATTAGCTGGTCAATATTTTTGTC |
| | | | CAAAATACCTGCAAGAGTAATAAAATACATACCTTTCAAACATGATAATTATTAG |
| | | | TTTTTTTTTTTCCTTTCTGGAACATGGATTTTGGTACATTAGCAGTAGCCTTATT |
| | | | TTAATGCTTTATGTCCTAAACATACTAATAGAAATGAAAAGACGCAGAGAGAGCA |
| | | | TTTCGGAATACTGAAGTACTAGTTTTAGAAATGAGACTTTCAGCCAACAATCTAT |
| | | | AGAAAGAATTTTATGGACCATCTTGTTTTAGTTATTTAATGTTGATGTTGTTCAA |
| | | | ATGGGTAAATGTACAGAAAGAAAATTTTAGAGTAAACTTGGAACTTTGGATATA |
| | | | ACTAGAAAAAACTAGATTATAGAATTAGTCGGTAACACTTGCTAATGGACATTGG |
| | | | CATTCATCTCCTTTTTCCTCCTAAGTGTATGTATGTGTTTTAAGATTTCTGTTTT |
| | | | TACGATTAAAACTGGAAACATGAGGTTTTTTGTTTTTGTTTTTTTACATAATTAC |
| | | | ATATATTCCTTCTGAATCATTTATCTTTTGAGAAAGAAATGTTACCTAAACTTCA |
| | | | AATGTGCTTTTTGTTTGTGAGGTAATTAAATTGCTTCTACAGTGGAGGCTTACAA |
| | | | AATTATTGTGACAACTATTTTGAAGCTGAAAGGATAGTTTTTCTATTGCTAAGTC |
| | | | ATTTGAAAAAGTGACCATTTTGCCAGTGAAATGAAGTGGAAGTTAGTAGGAGAA |
| | | | TCATAAATTAAATATATTATTTTGTTAATAAAAAGGCAAAGTAGTAGGTACTTTT |
| | | | TAAACCCTCCCAACCAGCCCTTTCTCAATATTCATCAAATCTAAAACATTTAGGG |
| | | | GGCAAAATTCTAACATGTTCATGGTATCTTGCAAATAGTGAAAGCTTTATTCTGA |
| | | | AGGATTATAAACTAGTTTTCTTCATTTTAACTAGCACTATTTGTGGAAATTAGA |
| | | | AACCTCTTTTATTTCTCTTCCCAAAAGTAATACTTATTATAAGGCTGTAGTATCA |
| | | | GGTTAAGGATACAGATAAATAAAGTTCACTTATATCTTCTTACAAATGTCTGGGT |
| | | | TTTAATATGGTTAATCACTTATATACAAATATTACAACTTTTTAGTGCAAGTTTTT |
| | | | GGAAGAAAACTTTTTGATAAAACACTGTGATTGATGTGACTTTATTTTTAATTTA |
| | | | AACGATGAGGTGGCCAGAAGAAAGATGGGTCTAAAATTTCTCCCCATGAAAGAT |
| | | | GTAAAACTATGGCTTTTTTTAAAATCAAAATTTCATCTTTTAAAATAATGGTTTG |
| | | | AAATACTGTATGGATCTGAACAGAATAATCACATTTAGGATTCTATATAAATCTC |
| | | | AACTGGAGTATAATCTGAAGGAAATTAGCAGTGTATTTTAAGAAATATATTTCAA |
| | | | AAATATAAATACTGATTATGAACTTCCTTTTACATTGTGGTTATTTGTGCGATTA |
| | | | GGTTTTTTTGTTTGTTTCTTTTGTGTTTGTTTGGCGGGAGAGGGTGACCTGGAA |
| | | | AGCCACAAGTGAGTATTTGACATATTCTGTATCCTTAATCCAATCATTTGGCAAA |
| | | | CTAAAAGGTTTCTGTGTTGTAAGAATCTGATACTAGTGCTTAAGACTTTGGGAA |
| | | | GCATTGCACTGTTGTTTATTAGAACTTTATGTATATTTACTGTACATAGAGACTT |
| | | | GTTTGAAAACATGAATAGTCATTAAATAAAGACATTGTTAAATTAGTTTTTGAAT |
| | | | ACCAGTGATATTCATAACTACTTGACAGGTATATATGAAAATTCTACTATCGTGA |
| | | | AAAAAAATGAATATTTGTACTATTTTTGGCCATATTTATATTTATTTCTTTCATAT |
| | | | GGTTTGAACTGTTTTAGCATTTTGTAAATTCACTTGAGAGTTTTCTTTCATACTG |
| | | | GTTAAAATATTTCAATGATATAATGAAGATGAATGCAACTCTTATTTTTCTGCCA |
| | | | TTTTTTATTAAAATACATTGAAACTAAAGTAGGCTCGGGGTTAACTTTAAAAGTG |
| | | | ATATTTGAGAAGTGCTTTAGAGTTGAAAGATTTAGTATTTTACCACGTGCCTAGT |
| | | | AGGGTTCTATTTGCTAACTCTAATATTGAGGAAACTATTAAGGTTTTCAGTAGTA |
| | | | AGTGTTGCTTCTAATAGCCATATACAGGAAAGTTTTATAAGATAACCCACGGCTA |
| | | | AATATTTTGCATTAAGGAGCTGTAGGAGTACAGTGTATAAGTACAGAAATTGAG |
| | | | AGAAATGTAGTCATTTTATATGTGAAAACATCTGATTTGAGTTTTTGATAAATAC |
| | | | TGCTAAAACACAGTATATGAACAAGTAAGAAGTTTATGTATGAAAGTAATCAATG |
| | | | TAAAATATAAGAAAGGAATAAATGGTACCCATTTTGAATTTTTAATTCTAATAGG |
| | | | AGAGTAGATTGTAGATTGAATTGTCTTTCCTGTTTALTTGTTAATTAGAAAATGC |
| | | | ATCCTTCATAAACAGCTCCTTTCTCAAATTTTTTGTATATTGTGTTTGTGTTTGG |
| | | | GTTTTAGTTTGTACCCGCGCTAAGTTTTGGTTTTGTTGTGHTGGTGTTTTTTGT |
| | | | TTTGTTTTGTTTGTTTTGTTTTTTCTTTTTTAACCAACCTGTGTATTAGGTGTT |
| | | | AGCCCCAATAGCCATGCATGAAATCTTTAAATAAAAGTTAAAAAAGTTCTTTAGA |
| | | | GGCAAAAAAAAAAAA |
| 584 | Human CD113 | Human CD113 amino acid | MAEGWRWCFVRRTPGLLRGPLLPRSFSGNPRALAGPIIVEPHVTAVWGKNVSLKCL |
| | | sequence | IEVNETITQISWEKIHGKSSQTVAVHHPQYGFSVQGEYQGRVLFKNYSLNDATITL |
| | | NCBI accession number: | HNIGFSDSGKYICKAVTFPLGNAQSSTIVTVLVEPTVSLIKGPDSLIDGGNETVAAIC |
| | | NM_001243288.1 | IAATGKPVAHIDWEGDLGEMESTTTSFPNETATIISQYKLFPTRFARGRRITCVVKH |
| | | Uniprot accession number: | PALEKDIRYSFILDIQYAPEVSVTGYDGNWFVGRKGVNLKCNADANPPPFKSVWSR |
| | | Q9NQS3-3 | LDGQWPDGLLASDNTLHFVHPLTFNYSGVYICKVINSLGQRSDQKVIYISDVPFKQ |
| | | Differs from sequence Uniprot | TSSIAVAGAVIGAVLALFIIAIFVTVLLTPRKKRPSYLDKVIDLPPTHKPPPLYEERSPP |
| | | Q9NQS3-1 (Seq ID No: 580) | LPQKDLFQPEHLPLQTQFKEREVGNLQHSNGLNSRSFDYEDENPVGEDGIQQMYP |
| | | 1-54: | LYNQMCYQDRSPGKHHQNNDPKRVYIDPREHYV |
| | | MARTLRPSPL...PLLLFSRLCG → | |
| | | MAEGWRWCFVRRTPGLLRGPLLP | |
| | | RSFSGNPR | |
| | | 357-549: | |
| | | DPPTTTTLQP...SVISRREVVYV → | |
| | | DVPFKQTSSI...VYIDPREHYV | |
| 585 | Human CD113 | Nucleotide sequence encoding | AGGCTCTGTGGTAGGTGAACCTCGGCGGCCGGCGTGGGCTGAGGGAGCCGCCA |
| | | human CD113 | CTGAGGGTGCGGGCGCCGCGGCCGGCTCTGCCAGCCGTTCTCTGGAGCAGCGA |
| | | NCBI accession number: | GGCGGTTGGTTGTGCGAGCGAGTGCCGAGGACTTTGGCTGGAAACTTTTCGCC |
| | | NM_001243288. 1 | GCGCCCGGGGCGAGGCCCTGGAAGGGCCAGGCCAGCGAATGCTGAGCCGGCGG |
| | | | CCCGCTGCCCTCCCCCGCGGCCGCGCGGGTCGCCGTGCGGATGGCCGAGGGTT |
| | | | GGCGATGGTGCTTCGTGCGCCGAACTCCGGGTTTGCTCCGGGGACCGTTACTTC |
| | | | CTCGCTCATTCTCTGGGAACCCTCGTGCCTTAGCTGGACCAATTATTGTGGAGC |
| | | | CACATGTCACAGCAGTATGGGGAAAGAATGTTTCATTAAAGTGTTTAATTGAAG |
| | | | TAAATGAAACCATAACACAGATTTTCATGGGAGAAGATACATGGCAAAAGTTCACA |
| | | | GACTGTTG |
| | | | CAGTTCACCATCCCCAATATGGATTCTCTGTTCAAGGAGAATATCAGGGAAGAG |
| | | | TCTTGTTTAAAAATTACTCACTTAATGATGCAACAATTACTCTGCATAACATAGG |
| | | | ATTCTCTGATTCTGGAAAATACATCTGCAAAGCTGTTACATTCCCGCTTGGAAAT |
| | | | GCCCAGTCCTCTACAACTGTAACTGTGTTAGTTGAACCCACTGTGAGCCTGATAA |
| | | | AAGGGCCAGATTCTTTAATTGATGGAGGAAATGAAACAGTAGCAGCCATTTGCA |
| | | | TCGCAGCCACTGGAAAACCCGTTGCACATATTGACTGGGAAGGTGATCTTGGTG |
| | | | AAATGGAATCCACTACAACTTCTTTTCCAAATGAAACGGCAACGATTATCAGCCA |
| | | | GTACAAGCTATTTCCAACCAGATTTGCTAGAGGAAGGCGAATTACTTGTGTTGT |
| | | | AAAACATCCAGCCTTGGAAAAGGACATCCGATACTCTTTCATATTAGACATACAG |
| | | | TATGCTCCTGAAGTTTCGGTAACAGGATATGATGGAAATTGGTTTGTAGGAAGA |
| | | | AAAGGTGTTAATCTCAAATGTAATGCTGATGCAAATCCACCACCCTTCAAATCTG |
| | | | TGTGGAGCAGGTTGGATGGACAATGGCCTGATGGTTTATTGGCTTCAGACAATA |
| | | | CTCTTCATTTTGTCCATCCATTGACTTTCAATTATTCTGGTGTTTATATCTGTAA |
| | | | AGTGACCAATTCCCTTGGTCAAAGAAGTGACCAAAAAGTCATCTACATTTCAGAT |
| | | | GTTCCATTTAAGCAGACCTCTTCCATAGCTGTAGCTGGAGCGGTAATTGGAGCT |
| | | | GTTCTTGCCCTTTTCATCATTGCTATCTTTGTGACTGTGCTGCTGACTCCTCGAA |
| | | | AAAAAAGACCATCCTATCTTGACAAAGTGATTGACCTTCCACCCACACATAAACC |
| | | | ACCTCCTCTGTATGAAGAACGATCCCCACCTTTGCCTCAGAAAGACCTATTTCAG |
| | | | CCTGAACACTTGCCTTTGCAGACTCAGTTCAAAGAAAGAGAAGTTGGCAATCTTC |
| | | | AGCACTCTAATGGACTAAATAGCAGGAGTTTTGACTATGAAGATGAGAATCCAG |
| | | | TTGGGGAAGATGGCATTCAGCAGATGTACCCCCTTTACAATCAAATGTGCTACC |
| | | | AAGACCGGAGCCCTGGCAAACATCATCAAAATAACGACCCTAAGAGAGTCTACA |
| | | | TCGACCCACGAGAACATTATGTGTGATTTTTCTCTTTTTCCAATGGGCGTTCTAA |
| | | | CAAATGTTTATTCTTAGATTGGGGAGAGAAGCTAAGGCCAATAGTTATTTTACT |
| | | | GTCTCTCATATAAGAACAGTCCCACTCTAAGGGTATTGGAAGTCTTAATGAATGA |
| | | | CGTAAAGCCAATAGCAAATTTCTTTTCTTCATTAAGCTTTCTTAACCACCAGCT |
| | | | GTCTTTTGTGAACTTGACTATAGCTTTGTGTGTTTCTGTGATGATGGTATTTAACT |
| | | | GCTAACATTTGGCCTACAATGGCATTTTCATTTAACAGTACAGCATCTGCCTGTG |
| | | | ATAACTGCAGTGATTCTCCAGAAAGAAAGGCCCCAGCTGATACTATTAACCTCGT |
| | | | TGGGTCTCAGGCATGCTAGCCTGTTCATCTGTAATTCACACAGGCATAAAAATG |
| | | | AGTTCAGAATCTATTTCACTAATTATTTAGCTGGGATTTGGATTTCCCTGACATG |
| | | | CTTAATACAATTACAATACCTGTGTACAAACAGAGGCCTGAGGAAAGAGGCAAA |
| | | | ATTTGCTTTTCATCCAAACAGCAACAAAAGGCAGTTGAAACCTTCAAGCCTGTTG |
| | | | GTTGCTTTTAAACCTTTGTGTTATTATGATATATATTCTTTGTTGAGCACTGAGG |
| | | | TCCTGAGGGATACATATCTCTTGCTGTTTTCTG |
| | | | CCTACTTTTGACTAGCTGTATGTAACAAAGGCTCTACTTTTGCTCTGTCACTGTT |
| | | | CCTACAGTCCTGTTCTTTACTAGCTAGATTAGCCTATTTTGCACCTATTAAATTC |
| | | | TAAAAACCTTGTTTAAAAAAAAAAAAAAAAAA |
| 586 | Human DNAM-1 | Human DNAM-1 amino acid | MDYPTLLLALLHVYRALCEEVLWHTSVPFAENMSLECVYPSMGILTQVEWF |
| | | sequence | KIGTQQDSIAIFSPTHGMVIRKPYAERVYFLNSTMASNNMTLFFRNASE |
| | | NCBI Accession number: | DDVGYYSCSLYTYPQGTWQKVIQVVQSDSFEAAVPSNSHIVSEPGKNVT |
| | | NM_006566.3 | LTCQPQMTWPVQAVRWEKIQPRQIDLLTYCNLVHGRNFTSKFPRQIVS |
| | | Uniprot accession number: | NCSHGRWSVIVIPDVTVSDSGLYRCYLQASAGENETFVMRLTVAEGKTD |
| | | Q15762 | NQYTLFVAGGTVLLLLFVISITTIIVIFLNRRRRRERRDLFTESWDTQKAPNNYRSP |
| | | Protein domains annotated as | ISTSQPTNQSMDDTREDIYVNYPTFSRRPKTRV |
| | | follows: | |
| | | Signal peptide (double line), | |
| | | extracellular domain (bold), | |
| | | transmembrane domain (italic) | |
| | | and cytoplasmatic domain | |
| | | (underlined) | |
| | | Reported variant to this | |
| | | sequence: | |
| | | (307) S → G | |
| 587 | Human DNAM4 | Nucleotide sequence encoding | TAGAACAAAGGAGAAGTGCGTCCTTTCAAATTATAGATTCTTTGGGGGAAAAGA |
| | | human DNAM-1 | GGGACAGAACTTTATCTGAGTTTGGAATGAGTCTGAGTAGCTGCAATAGTAAAG |
| | | NCBI Accession number: | TTGCTTCCAGAAGCAGGTAAACTTGACTTCAAAAAACCCCGCTTCATGAAATATT |
| | | Nucleotide sequence Transcript | AGTGATTCACTTCAGTTGCTATCTGAGGAAGTTCTGGTAGAGAGAAGAGCTCAA |
| | | variant 1 | GAGCATGGGCAGAGTCAGCTCCTGAGTGGGCTGAACGCTCCCCTCAGCTCCTGC |
| | | NM_0065663 | AGTGCTAATTAAGGGAGGGAGCAGCGGGGAGCTTGCAGTGACCAAGAGGGTGT |
| | | | TGAGGCTAGGAGGCCACGATAAACAGGATACGATAAAAGTCCTTAACCAAGACG |
| | | | CAGATGGGAAGAAGCGTTAGAGCGAGCAGCACTCACATCTCAAGAACCAGCCTT |
| | | | TCAAACAGTTTCCAGAGATGGATTATCCTACTTTACTTTTGGCTCTTCTTCATGT |
| | | | ATACAGAGCTCTATGTGAAGAGGTGCTTTGGCATACATCAGTTCCCTTTGCCGA |
| | | | GAACATGTCTCTAGAATGTGTGTATCCATCAATGGGCATCTTAACACAGGTGGA |
| | | | GTGGTTCAAGATCGGGACCCAGCAGGATTCCATAGCCATTTTCAGCCCTACTCA |
| | | | TGGCATGGTCATAAGGAAGCCCTATGCTGAGAGGGTTTACTTTTTGAATTCAAC |
| | | | GATGGCTTCCAATAACATGACTCTTTTCTTTCGGAATGCCTCTGAAGATGATGTT |
| | | | GGCTACTATTCC |
| | | | TGCTCTCTTTACACTTACCCACAGGGAACTTGGCAGAAGGTGATACAGGTGGTT |
| | | | CAGTCAGATAGTTTTGAGGCAGCTGTGCCATCAAATAGCCACATTGTTTCGGAA |
| | | | CCTGGAAAGAATGTCACACTCACTTGTCAGCCTCAGATGACGTGGCCTGTGCAG |
| | | | GCAGTGAGGTGGGAAAAGATCCAGCCCCGTCAGATCGACCTCTTAACTTACTGC |
| | | | AACTTGGTCCATGGCAGAAATTTCACCTCCAAGTTCCCAAGACAAATAGTGAGCA |
| | | | ACTGCAGCCACGGAAGGTGGAGCGTCATCGTCATCCCCGATGTCACAGTCTCAG |
| | | | ACTCGGGGCTTTACCGCTGCTACTTGCAGGCCAGCGCAGGAGAAAACGAAACCT |
| | | | TCGTGATGAGATTGACTGTAGCCGAGGGTAAAACCGATAACCAATATACCCTCT |
| | | | TTGTGGCTGGAGGGACAGTTTTATTGTTGTTGTTTGTTATCTCAATTACCACCAT |
| | | | CATTGTCATTTTCCTTAACAGAAGGAGAAGGAGAGAGAGAAGAGATCTATTTAC |
| | | | AGAGTCCTGGGATACACAGAAGGCACCCAATAACTATAGAAGTCCCATCTCTACC |
| | | | AGTCAACCTACCAATCAATCCATGGATGATACAAGAGAGGATATTTATGTCAACT |
| | | | ATCCAACCTTCTCTCGCAGACCAAAGACTAGAGTTTAAGCTTATTCTTGACATGA |
| | | | GTGCATTAGTAATGACTCTTATGTACTCATGCATGGATCTTTATGCAATTTTTTT |
| | | | CCACTACCCAAGGTCTACCTTAGATACTAGTTGTCTGAATTGAGTTACTTTGATA |
| | | | GGAAAAATACTTCATTACCTAAAATCATTTTTCATAGAACTGTTTCAGAAAACCT |
| | | | GACTCTAACTGGTTTATATACAAAAGAAAACTTACTGTATCATATAACAGAATGA |
| | | | TCCAGGGGAGATTAAGCTTTGGGCAAGGGCTATTTACCAGGGCTTAAATGTTGT |
| | | | GTCTAGAATTAAGTATGGGCATAAACTGGCTTCTGAATCCCTTTCCAGAGTGTT |
| | | | GGATCCATTTCCCTGGTCTTGGCCTTCACTCTCATGCAGGCTTTCCTCTTGTGTTG |
| | | | GCAAGATGGCTGCCAACTCTTGGCAATTCATACATCCTTGTTTCTGTCTGGTAGA |
| | | | GACTTTGCTTCTCAAATGGAGCAAACAAATTTGATTATTTTTTCATTGTTAAATA |
| | | | GGCAACATGACCAGAAAGGATGGAATGGCTTAAGTAAACTAAGGGTTCACTTCT |
| | | | AGAGCTGAGAAGCAGGGTCAAAGCACAATACTGGGCAATTCAGAGCATGGTTAG |
| | | | AAGAGGAAAGGGGAGTCTCAAA |
| | | | GCTGGAGAGTTTACCAACAAATATTGACTGCAGTGATTAACCAAGACATTTTTGT |
| | | | TAACTAAAAAGTGAAATATGGGATGGATTCTAGAAATGGGGTATCTCTGTCCAT |
| | | | ACTTCTAGAATCCACTCTATCAGCATAGTCCAGAAGAATACCTGGCAGTAGAAGA |
| | | | AATGAATATTCAAGAGGAAGATAAATGCGAGAGGGCAATCCTTTACTATTCTCAT |
| | | | ATTTATTTATCTCTCATTCTGTATAGAATTCTTGCCGCCATCCCAGGTCTAGCCT |
| | | | TAGGAGCAAATGTAGTAGATAGTCGAATAATAAATAACTTAATGTTTTGGACATA |
| | | | TTTTGTCTACTTTTGAGAATTATTTTTAATATGTAAATTCTCTCAAAAGGGTCAG |
| | | | GCACCTAGTTATTATTTTTTAATGATTATGTGAAAGTTGAATATAATATACCACT |
| | | | AAAAGTGACAGTTGAAAGTGGTGGCATAGGACGGTAGGGTAGAAATTTGGGAG |
| | | | GGAAAAAAGAAATTGGGAGGGTACAGGCAACAGGAGAAAGGAATCAAACCACAG |
| | | | AAAAATACAAAGGGAAACTTCTGCTTCACTATTCAGACAAAGACAGCCCTAATGA |
| | | | CATCACCAACAGTCAAAGCAATTAGAGACCATACCTAATATTGTTTAAATTCTAG |
| | | | ATGTAGGCTAACAATGAAAAGTATTTGCCAAACTGAATAAAACTGTCATGGTTAC |
| | | | CTTGAAAAAAAAAAAAAAAAAAAAAAAAAAAAA |
| 588 | Human DNAM-1 | Nucleotide sequence encoding | ATGCATGCACCACCTTTCACTTATTATTTATATTTTTACATCTTTATTAGTTTTC |
| | | human DNAM-1 | TGCCTCCTCCACATAGAATGTAAGTTCTATCATGGCAATATTTTTTTTTTTTTGT |
| | | NCBI Accession number: | ATTATTGTATCCTCATTGCCTACAGCTGAGTTAGGCACAGAGAATGCATGCAGC |
| | | Nucleotide sequence Transcript | ACATGTTTGTTGAATGAATGACTCCTTGTAGAAAATGAAAGCCCGAAAATAAGCC |
| | | variant 2 | GACTGGTTCCCCGAGAGAGAAGAAACTCAAATCTGCCCATCCTCATAAAGGAGC |
| | | NM_001303618.1 | AAACCTGTCTTTTAAGCTAAGGCCTTTTTCCTGTGTTCATACTTCAGAAAAAGAA |
| | | This variant (2) differs in the | GACACGACTGATAACATCTGAGAGGAAGGAAACTGCATTGTGCTGGGGATCTGC |
| | | 5′ UTR compared to variant 1. | ATGTCACATTATAAAAAGCAATTTTTTTTTTTAATAGAACCAGCCTTTCAAACAG |
| | | Both encode the same isoform | TTTCCAGAGATGGATTATCCTACTTTACTTTTGGCTCTTCTTCATGTATACAGAG |
| | | | CTCTATGTGAAGAGGTGCTTTGGCATACATCAGTTCCCTTTGCCGAGAACATGT |
| | | | CTCTAGAATGTGTGTATCCATCAATGGGCATCTTAACACAGGTGGAGTGGTTCA |
| | | | AGATCGGGACCCAGCAGGATTCCATAGCCATTTTCAGCCCTACTCATGGCATGG |
| | | | TCATAAGGAAGCCCTATGCTGAGAGGGTTTACTTTTTGAATTCAACGATGGCTT |
| | | | CCAATAACATGACTCTTTTCTTTCGGAATGCCTCTGAAGATGATGTTGGCTACTA |
| | | | TTCCTGCTCTCTTTACACTTACCCACAGGGAACTTGGCAGAAGGTGATACAGGT |
| | | | GGTTCAGTCAGATAGTTTTGAGGCAGCTGTGCCATCAAATAGCCACATTGTTTC |
| | | | GGAACCTGGAAAGAATGTCACACTCACTTGTCAGCCTCAGATGACGTGGCCTGT |
| | | | GCAGGCAGTGAGGTGGGAAAAGATCCAGCCCCGTCAGATCGACCTCTTAACTTA |
| | | | CTGCAACTTGGTCCATGGCAGAAATTTCACCTCCAAGTTCCCAAGACAAATAGTG |
| | | | AGCAACTGCAGCCACGGAAGGTGGAGCGTCATCGTCATCCCCGATGTCACAGTC |
| | | | TCAGACTCGGGGCTTTACCGCTGCTACTTGCAGGCCAGCGCAGGAGAAAACGAA |
| | | | ACCTTCGTGATGAGATTGACTGTAGCCGAGGGTAAAACCGATAACCAATATACC |
| | | | CTCTTGTGGCTGGAGGGACAGTTTTATTGTTGTTGTTTGTTATCTCAATTACCA |
| | | | CCATCATTGTCATTTTCCTTAACAGAAGGAGAAGGAGAGAGAGAAGAGATCTAT |
| | | | TTACAGAGTCCTGGGATACACAGAAGGCACCCAATAACTATAGAAGTCCCATCTC |
| | | | TACCAGTCAACCTACCAATCAATCCATGGATGATACAAGAGAGGATATTTATGTC |
| | | | AACTATCCAACCTTCTCTCGCAGACCAAAGACTAGAGTTTAAGCTTATTCTTGAC |
| | | | ATGAGTGCATTAGTAATGACTCTTATGTACTCATGCATGGATCTTTATGCAATTT |
| | | | TTTTCCACTACCCAAGGTCTACCTTAGATACTAGTTGTCTGAATTGAGTTACTTT |
| | | | GATAGGAAAAATACTTCATTACCTAAAATCATTTTTCATAGAACTGTTTCAGAAA |
| | | | ACCTGACTCTAACTGGTTTATATACAAAAGAAAACTTACTGTATCATATAACAGA |
| | | | ATGATCCAGGGGAGATTAAGCTTTGGGCAAGGGCTATTTACCAGGGCTTAAATG |
| | | | TTGTGTCTAGAATTAAGTATGGGCATAAACTGGCTTCTGAATCCCTTTCCAGAGT |
| | | | GTTGGATCCATTTCCCTGGTCTTGGCCTCACTCTCATGCAGGCTTTCCTCTTGTG |
| | | | TTGGCAAGATGGCTGCCAACTCTTGGCAATTCATACATCCTTGTTTCTGTCTGGT |
| | | | AGAGAGTTTGCTTCTCAAATGGAGCAAACAAATTTGATTATTTTTTCATTGTTAA |
| | | | ATAGGCAACATGACCAGAAAGGATGGAATGGCTTAAGTAAACTAAGGGTTCACT |
| | | | TCTAGAGCTGAGAAGCAGGGTCAAAGCACAATACTGGGCAATTCAGAGCATGGT |
| | | | TAGAAGAGGAAAGGGGAGTCTCAAAGCTGGAGAGTTTACCAACAAATATTGACT |
| | | | GCAGTGATTAACCAAGACATTTTTGTTAACTAAAAAGTGAAATATGGGATGGAT |
| | | | TCTAGAAATGGGGTATCTCTGTCCATACTTCTAGAATCCACTCTATCAGCATAGT |
| | | | CCAGAAGAATACCTGGCAGTAGAAGAAATGAATATTCAAGAGGAAGATAAATGC |
| | | | GAGAGGGCAATCCTTTACTATTCTCATATTATTATCTCTCATTCTGTATAGAA |
| | | | TTCTTGCCGCCATCCCAGGTCTAGCCTTAGGAGCAAATGTAGTAGATAGTCGAA |
| | | | TAATAAATAACTTAATGTTTGGACATATTTTGTCTACTTTTGAGAATTATAAT |
| | | | AATATGTAAATTCTCTCAAAAGGGTCAGGCACCTAGTTATTATTTTTTAATGATT |
| | | | ATGTGAAAGTTGAATATAATATACCACTAAAAGTGACAGTTGAAAGTGGTGGCA |
| | | | TAGGACGGTAGGGTAGAAATTTGGGAGGGAAAAAAGAAATTGGGAGGGTACAG |
| | | | GCAACAGGAGAAAGGAATCAAACCACAGAAAAATACAAAGGGAAACTTCTGCTT |
| | | | CACTATTCAGACAAAGACAGCCCTAATGACATCACCAACAGTCAAAGCAATTAGA |
| | | | GACCATACCTAATATTGTTTAAATTCTAGATGTAGGCTAACAATGAAAAGTATTT |
| | | | GCCAAACTGAATAAAACTGTCATGGTTACCTTGAAAAAAAAAAAAAAAAAAAAAA |
| | | | AAAAAAA |
| 589 | Human DNAM-1 | Human DNAM-1 amino acid | MTWPVQAVRWEKIQPRQIDLLTYCNLVHGRNFTSKFPRQIVSNCSHGRWSVIVIP |
| | | sequence | D |
| | | NCBI Accession number: | VIVSDSGLYRCYLQASAGENETFVMRLIVAEGKTDNQYTLFVAGGTVLLLIFVISIT |
| | | Amino acid sequence Transcript | TIIVIFLNRRRRRERRDLFTESWDTQKAPNNYRSPISTSQPTNQSMDDTREDIYVN |
| | | variant 3 | YPTFSRRPKTRV |
| | | NM_001303619.1 | |
| 590 | Human DNAM-1 | Nucleotide sequence encoding | TAGAACAAAGGAGAAGTGCGTCTTTCAAATTATAGATTCTTTGGGGGAAAAGA |
| | | human DNAM-1 | GGGACAGAACTTTATCTGAGTTTGGAATGAGTCTGAGTAGCTGCAATAGTAAAG |
| | | NCBI Accession number: | TTGCTTCCAGAAGCAGGTAAACTTGACTTCAAAAAACCCCGCTTCATGAAATATT |
| | | Nucleotide sequence Transcript | AGTGATTCACTTCAGTTGCTATCTGAGGAAGTTCTGGTAGAGAGAAGAGCTCAA |
| | | variant 3 | GAGCATGGGCAGAGTCAGCTCCTGAGTGGGCTGAACGCTCCCCTCAGCTCCTGC |
| | | NM_001303619.1 | AGTGCTAATTAAGGGAGGGAGCAGCGGGGAGCTTGCAGTGACCAAGAGGGTGT |
| | | | TGAGGCTAGGAGGCCACGATAAACAGGATACGATAAAAGTCCTTAACCAAGACG |
| | | | CAGATGGGAAGAAGCGTTAGAGCGAGCAGCACTCACATCTCAAGATAGTTTTGA |
| | | | GGCAGCTGTGCCATCAAATAGCCACATTGTTTCGGAACCTGGAAAGAATGTCAC |
| | | | ACTCACTTGTCAGCCTCAGATGACGTGGCCTGTGCAGGCAGTGAGGTGGGAAAA |
| | | | GATCCAGCCCCGTCAGATCGACCTCTTAACTTACTGCAACTTGGTCCATGGCAG |
| | | | AAATTT CACCTCCAAGTTCCCAAGACAAATAGTGAGCAACTGCAGCCACGGAAG |
| | | | GTGGAGCGTCATCGTCATCCCCGATGTCACAGTCTCAGACTCGGGGCTTTACCG |
| | | | CTGCTACTTGCAGGCCAGCGCAGGAGAAAACGAAACCTTCGTGATGAGATTGAC |
| | | | TGTAGCCGAGGGTA |
| | | | AAACCGATAACCAATATACCCTCTTTGTGGCTGGAGGGACAGTTTTATTGTTGTT |
| | | | GTTTGTTATCTCAATTACCACCATCATTGTCATTTTCCTTAACAGAAGGAGAAGG |
| | | | AGAGAGAGAAGAGATCTATTTACAGAGTCCTGGGATACACAGAAGGCACCCAAT |
| | | | AACTATAGAAGTCCCATCTCTACCAGTCAACCTACCAATCAATCCATGGATGATA |
| | | | CAAGAGAGGATATTTATGTCAACTATCCAACCTTCTCTCGCAGACCAAAGACTAG |
| | | | AGTTTAAGCTTATTCTTGACATGAGTGCATTAGTAATGACTCTTATGTACTCATG |
| | | | CATGGATCTTTATGCAATTTTTTTCCACTACCCAAGGTCTACCTTAGATACTAGT |
| | | | TGTCTGAATTGAGTTACTTTGATAGGAAAAATACTTCATTACCTAAAATCATTTT |
| | | | TCATAGAACTGTTTCAGAAAACCTGACTCTAACTGGTTTATATACAAAAGAAAAC |
| | | | TTACTGTATCATATAACAGAATGATCCAGGGGAGATTAAGCTTTGGGCAAGGGC |
| | | | TATTTACCAGGGCTTAAATGTTGTGTCTAGAATTAAGTATGGGCATAAACTGGC |
| | | | TTCTGAATCCCTTTCCAGAGTGTTGGATCCATTTCCCTGGTCTTGGCCTCACTCT |
| | | | CATGCAGGCTTTCCTCTTGTGTTGGCAAGATGGCTGCCAACTCTTGGCAATTCA |
| | | | TACATCCTTGTTTCTGTCTGGTAGAGAGTTTGCTTCTCAAATGGAGCAAACAAAT |
| | | | TTGATTATTTTTTCATTGTTAAATAGGCAACATGACCAGAAAGGATGGAATGGCT |
| | | | TAAGTAAACTAAGGGTTCACTTCTAGAGCTGAGAAGCAGGGTCAAAGCACAATA |
| | | | CTGGGCAATTCAGAGCATGGTTAGAAGAGGAAAGGGGAGTCTCAAAGCTGGAG |
| | | | AGTTTACCAACAAATATTGACTGCAGTGATTAACCAAGACATTTTTGTTAACTAA |
| | | | AAAGTGAAATATGGGATGGATTCTAGAAATGGGGTATCTCTGTCCATACTTCTA |
| | | | GAATCCACTCTATCAGCATAGTCCAGAAGAATACCTGGCAGTAGAAGAAATGAA |
| | | | TATTCAAGAGGAAGATAAATGCGAGAGGGCAATCCTTTACTATTCTCATATTTAT |
| | | | TTATCTCTCATTCTGTATAGAATTCTTGCCGCCATCCCAGGTCTAGCCTTAGGAG |
| | | | CAAATGTAGTAGATAGTCGAATAATAAATAACTTAATGTTTTGGACATATTTTGT |
| | | | CTACTTTTGAGAATTATTTTTAATATGTAAATTCTCTCAAAAGGGTCAGGCACCT |
| | | | AGTTATTATTTTTTAATGATTATGTGAAAGTTGAATATAATATACCACTAAAAGT |
| | | | GACAGTTGAAAGTGGTGGCATAGGACGGTAGGGTAGAAATTTGGGAGGGAAAA |
| | | | AAGAAATTGGGAGGGTACAGGCAACAGGAGAAAGGAATCAAACCACAGAAAAAT |
| | | | ACAAAGGGAAACTTCTGCTTCACTATTCAGACAAAGACAGCCCTAATGACATCAC |
| | | | CAACAGTCAAAGCAATTAGAGACCATACCTAATATTGTTTAAATTCTAGATGTAG |
| | | | GCTAACAATGAAAAGTATTTGCCAAAC |
| | | | TGAATAAAACTGTCATGGTTACCTTGAAAAAAAAAAAAAAAAAAAAAAAAAAAAA |
| 591 | Human CD96 | Human CD96 amino acid | MEKKWKYCAVYYIIQIHFVKGVWEKTVNTEENVYATLGSDVNLTCQTQTVGF |
| | | sequence | FVQMQWSKVTNKIDLIAVYHPQYGFYCAYGRPCESLVTFTETPENGSKW |
| | | NCBI Accession number: | TLHLRNMSCSVSGRYECMLVLYPEGIQTKIYNLLIQTHVTADEWNSNHT |
| | | Transcript variant 1 | IEIEINQTLEIPCFQNSSSKISSEFTYAWSVENSSTDSWVLLSKGIKEDNG |
| | | NM_198196.2 | TQETLISQNHLISNSTLLKDRVKLGTDYRLHLSPVQIFDDGRKFSCHIRV |
| | | Uniprot accession number: | GPNKILRSSTTVKVFAKPEIPVIVENNSTDVLVERRFTCLLKNVFPKANIT |
| | | P40200-1 | WFIDGSFLHDEKEGIYITNEERKGKDGFLELKSVLTRVHSNKPAQSDNLT |
| | | Protein domains annotated as | IWCMALSPVPGNKVWNISSEKITFLLGSEISSTDPPLSVTESTLDTQPSP |
| | | follows: | ASSVSPARYPATSSVTLVDVSALRPNTTPQPSNSSMTTRGFNYPVVTSSG |
| | | Signal peptide (double line), | TDTKKSVSRIPSETYSSSPSGAGSTLHDNVFTSTARAFSEVPTTANGSTK |
| | | extracellular domain (bold), | TNHVHITGIVVNKPKDGMSWPVIVAALLFCCMILFGLGVRKWCQYQKEIMERP |
| | | transmembrane domain (italic) | PPFKPPPPPIKYTCIQEPNESDLPYHEMETL |
| | | and cytoplasmatic domain | |
| | | (underlined) | |
| 592 | Human CD96 | Nucleotide sequence encoding | TTCCTGTCTACGTTTCATTTCCTGGGGGCTTGCCAAGTGATAAACAGACCCAGG |
| | | human CD96 | CGTGTGTGGTAGAGTTCGGGTTTTTTAGCACGAAGTGGGTGGCTGGAGTTTGC |
| | | NCBI Accession number: | TTGAAAACATCAATTGACTTTGTGATCATTACAGAAATGCTGGTGTAAGGTGTTC |
| | | Transcript variant 1 | AGAAGACAATGGAGAAAAAATGGAAATACTGTGCTGTCTATTACATCATCCAGA |
| | | NM_198196.2 | TACATTTTGTCAAGGGAGTTTGGGAAAAAACAGTCAACACAGAAGAAAATGTTT |
| | | | ATGCTACACTTGGCTCTGATGTCAACCTGACCTGCCAAACACAGACAGTAGGCT |
| | | | TCTTCGTGCAGATGCAATGGTCCAAGGTCACCAATAAGATAGACCTGATTGCTG |
| | | | TCTATCATCCCCAATACGGCTTCTACTGTGCCTATGGGAGACCCTGTGAGTCACT |
| | | | TGTGACTTTCACAGAAACTCCTGAGAATGGGTCAAAATGGACTCTGCACTTAAG |
| | | | GAATATGTCTTGTTCAGTCAGTGGAAGGTACGAGTGTATGCTTGTTCTGTATCC |
| | | | AGAGGGCATTCAGACTAAAATCTACAACCTTCTCATTCAGACACACGTTACAGCA |
| | | | GATGAATGGAACAGCAACCATACGATAGAAATAGAGATAAATCAGACTCTGGAA |
| | | | ATACCATGCTTTCAAAATAGCTCCTCAAAAATTTCATCTGAGTTCACCTATGCAT |
| | | | GGTCGGTGGAAAACAGCAGCACGGATTCTTGGGTCCTTCTTTCTAAGGGTATAA |
| | | | AGGAGGATAATGGAACTCAGGAAACACTTATCTCCCAAAATCACCTCATCAGCAA |
| | | | TTCCACATTACTTAAAGATAGAGTCAAGCTTGGTACAGACTACAGACTCCACCTC |
| | | | TCTCCAGTCCAAATCTTCGATGATGGGCGGAAGTTCTCTTGCCACATTAGAGTC |
| | | | GGTCCTAACAAAATCTTGAGGAGCTCCACCACAGTCAAGGTTTTTGCTAAACCA |
| | | | GAAATCCCTGTGATTGTGGAAAATAACTCCACGGATGTCTTGGTAGAGAGAAGA |
| | | | TTTACCTGCTTACTAAAGA |
| | | | ATGTATTTCCCAAAGCAAATATCACATGGTTTATAGATGGAAGTTTTCTTCATGA |
| | | | TGAAAAAGAAGGAATATATATTACTAATGAAGAGAGAAAAGGCAAAGATGGATT |
| | | | TTTGGAACTGAAGTCTGTTTTAACAAGGGTACATAGTAATAAACCAGCCCAATCA |
| | | | GACAACTTGACCATTTGGTGTATGGCTCTGTCTCCAGTCCCAGGAAATAAAGTG |
| | | | TGGAACATCTCATCAGAAAAGATCACTTTTCTCTTAGGTTCTGAAATTTCCTCAA |
| | | | CAGACCCTCCACTGAGTGTTACAGAATCTACCCTTGACACCCAACCTTCTCCAGC |
| | | | CAGCAGTGTATCTCCTGCAAGATATCCAGCTACATCTTCAGTGACCCTTGTAGAT |
| | | | GTGAGTGCCTTGAGGCCAAACACCACTCCTCAACCCAGCAATTCCAGTATGACTA |
| | | | CCCGAGGCTTCAACTATCCCTGGACCTCCAGTGGGACAGATACCAAAAAATCAG |
| | | | TTTCACGGATACCTAGTGAAACATACAGTTCATCCCCGTCAGGTGCAGGCTCAA |
| | | | CACTTCATGACAATGTCTTTACCAGCACAGCCAGAGCATTTTCAGAAGTCCCCAC |
| | | | AACTGCCAATGGATCTACGAAAACTAATCACGTCCATATCACTGGTATTGTGGTC |
| | | | AATAAGCCCAAAGATGGAATGTCCTGGCCAGTGATTGTAGCAGCTTTACTCTTT |
| | | | TGCTGCATGATATTGTTTGGTCTTGGAGTGAGAAAATGGTGTCAGTACCAAAAA |
| | | | GAAATAATGGAAAGACCTCCACCTTTCAAGCCACCACCACCTCCCATCAAGTACA |
| | | | CTTGCATTCAAGAGCCCAACGAAAGTGATCTGCCTTATCATGAGATGGAGACCC |
| | | | TCTAGTCTCGTGAGACTTTGCCCCATGGCAGAACTCTGCTGGAATCCTATTGAG |
| | | | AAGGTAGACATTGTGCTTTATTAATATAGTCGCTCTTCAGCCATGCCTTTGCTGC |
| | | | AGCTGAAATGGAAGTCAGAAGTGAGTGACCTGTTTTCCCAGCAACTCACCCTCT |
| | | | TCCATCTCCAAACGCCTGAAGCTTAACCAAGAGTGAGAGGATATGTCATGTTCA |
| | | | CACTCAATGCAATTCGTAGTGGTTTTCTTGCTTATGTAAGAAGTACATATTAGTC |
| | | | TGCCATCTTTAAAAAAAAATACAGTATTTTCATTTAAATTCTCTGATGGAGGGAC |
| | | | AACAATGGTTTCAACTGTATGCCCATGCCTGATCCTCTTATTTGAACATCTATCA |
| | | | ACATTGTAAACTCTTTGCCAAAATCCTGGGGCTTTGCTGCATTCCCTAAGATAAT |
| | | | TACAGGAAAAAGAAAATGTAAAAGTGCTAACAAGGCTGCCAAGTAATGGAGAAG |
| | | | TATGGTTAGTCTTCATATTGAAATTCTGTTGCTTATTTTCATGGAAGGAAACAGA |
| | | | ATACTTTGCACAGGAACCACATTTTCAATCCTCCTTCACTGTCTTCCTACCATGT |
| | | | TCAGCCCAGACTCCTGCCACATGGACCAGGATGAAGAGGGATCAAAGAGATAAT |
| | | | TAGCCAAAAACCCAGTAGCCTAGAAGATACAAAACTCCACTGGCCTCTAAAATTA |
| | | | TATTAGCCAAGAGTGGTTTCATTTGAG |
| | | | TGCTTCGTGTGTATGTCCATCAAACTGGAACCAAACTGTTTTGTAAGTAAACAG |
| | | | GCAGCCTAAGCCCAACCCTACTTTCTAATTCCAGTTATTCTCTTTTTCATCTGGG |
| | | | GATTTACCTGTTCATTTAATCTGCCTGTTTTGATCTGTTTTGAAAAAGATAAAGA |
| | | | GCCTCAAATCAGACCAGCACTGATTAATTAACCCTGCTCCTACCAATCTTTTTTA |
| | | | AAGCAGTTGAAGCAGAATGTATAGGTGTCAGAGAAGAAACCTAGTCAGCCAGAC |
| | | | GTGCTCTGTATTCAGCAATAGTTTGTGAATGAATAAATTACTAATCCTaCTTGTC |
| | | | GCTTGAAACCTTCCCACACTCCCTGCTCCAGGAGGGAAAAACAGATGTTGTTGA |
| | | | CAGATAGAGTGATAGGCAAATTCTGTGTGGACTTTAGTCCCAAAAGGAAACTTT |
| | | | AGTTCACTTGCAGTATGCTTATCCTTGACTGCACATGAGAATGCCTTGTGCAGA |
| | | | GTTATTTGGAGATTATGTCTTTTTCTTAAACACCATGGCTGTCACACTTCAGTTC |
| | | | AATTAAATCAGAATGTCTGAGGAGTGAGACACAGGCATCAACACTCTCAAATGA |
| | | | TTCACATGTTCAGCCAAAGTTGAGAACCATCGAGCCTGTGGAAGTTCTTTCTCAT |
| | | | GGCTCAGAATCTTAGGTAGGTGCTTAACTCTTGTGGTGGCCAGCCTCCAAGATG |
| | | | AGCCCCAGTGTTCTTGCCTCCTACTATTCACATCTTTATGTGGTCCCCTCCAATG |
| | | | CTGAATACAGATGATTTGTGTAACCTGAGGCCAGGATTAAGGGGAGGCAATCAA |
| | | | TGCACCTAGGGAAAAAATTTAAGGAGGTATTCACACTCAGGGTCATGCACTTGC |
| | | | ACAATGTTGAGAATGAGTACCACTCTCACCATTGGTATAGCCAAAAAAGCTTGG |
| | | | AAGTGACCAAGGCTAGGTCACAAAATACACTGTGGCTTCTTCTTTGATCTCTCTT |
| | | | TGACCATACTGACACTGGGAAAAGCCCATTCCCATGCCATGAAGACACCAAGGC |
| | | | AGCCCTATTGAGAAATCTACCTGTCGTGGCCGGGCGCAGTGGCTCACGCCTGTA |
| | | | ATCCCAGCACTTTGGGAGGCCGAGGTGGGTGGATCACGAGGTCAGGAGATCGA |
| | | | GACCATCCTGGCTAACACAGTGAAACCCCGTCTCTACTAAAAATACAAAAAATTA |
| | | | GCCGGGTGTGGTGTCGGGCACCTGTAGTCCCAGCTACTCAGGAGGCTGAGGCA |
| | | | GGAGAAGGGTGGGAACCCGGGAGGCAGAGCTTGCAGTGAGCCGAGATTGTGCC |
| | | | ACTGCACACTCCAATCTGGGTGAAAGACCGAGACTCCGCCTCAAAAAAAAAAAAA |
| | | | AAAGAAAGAAAGAAAGAAAGAAAGAAATCTACCTGTCAAGGAACTAAGGTATTT |
| | | | TGCTAACAAGCACCAACTTGCCAGCCATGTAAGGGAGCCATCTTGGAAGCAGAT |
| | | | CCTCCAGCCTCCAGTCAAGTCTTCAGATAATTGCAACTTCAGTTGATCTTTTGAC |
| | | | CAAGACCTCAAGAGAGCCAGAACTACCCAGCTAAGCCTTTTACTAAATTTCTGAA |
| | | | CTTCTAACACTATTAGATAATAAGTGCTTATTGTTTAACACCATTAATTTT GAGT |
| | | | ATAATTTGTTACATAGCGACAGATAACTATACAGCTCAACAACTAGAAAAATAAA |
| | | | CTGTTTACCTGCCTTAATTATTTATCTTTAGTTCCTTATTAGTTCTCAAGAAACA |
| | | | AATGCTAGCTTCATATGTATGGCTGTTGCTTTGCTTCATGTGTATGGCTATTTGT |
| | | | ATTTAACAAGACTTAATCATCAGTA |
| 593 | Human CD96 | Human CD96 amino acid | MEKKWKYCAVYYTIQIHFVKGVWEKTVNTEENVYATLGSDVNLTCQTQWGFFVQ |
| | | sequence | MQWSKVTNKIDLIAVYHPQYGFYCAYGRPCESLVTFTETPENGSKWTLHLRNMSC |
| | | NCBI Accession number: | SVSGRYECMLVLYPEGIQTKIYNLLIQTHVTADEWNSNHTIEIEINQTLEIPCFQNSS |
| | | Transcript variant 2 | SKISSEFTYAWSVEDNGTQETLISQNHLISNSTLLKDRVKLGTDYRLHLSPVQIFDD |
| | | NM_005816.4 | GRKFSCHIRVGPNKILRSSTTVKVFAKPEIPVIVENNSTDVLVERRFTCLLKNVFPKA |
| | | Uniprot P40200-2 | NITWFIDGSFLHDEKEGIYITNEERKGKDGFLELKSVLTRVHSNKPAQSDNLTIWC |
| | | Differs from sequence Uniprot | MALSPVPGNINWNISSEKITFLLGSEISSTDPPLSVTESTLDTQPSPASSVSPARYPA |
| | | P40200-1 (Seq ID No: 591) | TSSVTLVDVSALRPNTTPQPSNSSMTTRGFNYPVVTSSGTDIKKSVSRIPSETYSSS |
| | | 182-197: Missing | PSGAGSTLHDNVFTSTARAFSEVPTTANGSTKTNHVHITGIVVNKPKDGMSWPVTV |
| | | Reported variant to this | AALLFCCMILFGLGVRKWCQYQKEIMERPPPFKPPPPPIKYTCIQEPNESDLPYHEM |
| | | sequence: | ETL |
| | | (142) A → P | |
| | | (280) T → M | |
| 594 | Human CD96 | Nucleotide sequence encoding | TTCCTGTCTACGTTTCATTTCCTGGGGGCTTGCCAAGTGATAAACAGACCCAGG |
| | | human CD96 | CGTGTGTGGTAGAGTTCGGGTTTTTTAGCACGAAGTGGGTGGCTGGAGTTTGC |
| | | NCBI Accession number: | TTGAAAACATCAATTGACTTTGTGATCATTACAGAAATGCTGGTGTAAGGTGTTC |
| | | Transcript variant 2 | AGAAGACAATGGAGAAAAAATGGAAATACTGTGCTGTCTATTACATCATCCAGA |
| | | NM_005816.4 | TACATTTTGTCAAGGGAGTTTGGGAAAAAACAGTCAACACAGAAGAAAATGTTT |
| | | | ATGCTACACTTGGCTCTGATGTCAACCTGACCTGCCAAACACAGACAGTAGGCT |
| | | | TCTTCGTGCAGATGCAATGGTCCAAGGTCACCAATAAGATAGACCTGATTGCTG |
| | | | TCTATCATCCCCAATACGGCTTCTACTGTGCCTATGGGAGACCCTGTGAGTCACT |
| | | | TGTGACTTTCACAGAAACTCCTGAGAATGGGTCAAAATGGACTCTGCACTTAAG |
| | | | GAATATGTCTTGTTCAGTCAGTGGAAGGTACGAGTGTATGCTTGTTCTGTATCC |
| | | | AGAGGGCATTCAGACTAAAATCTACAACCTTCTCATTCAGACACACGTTACAGCA |
| | | | GATGAATGGAACAGCAACCATACGATAGAAATAGAGATAAATCAGACTCTGGAA |
| | | | ATACCATGCTTTCAAAATAGCTCCTCAAAAATTTCATCTGAGTTCACCTATGCAT |
| | | | GGTCGGTGGAGGATAATGGAACTCAGGAAACACTTATCTCCCAAAATCACCTCA |
| | | | TCAGCAATTCCACATTACTTAAAGATAGAGTCAAGCTTGGTACAGACTACAGACT |
| | | | CCACCTCTCTCCAGTCCAAATCTTCGATGATGGGCGGAAGTTCTCTTGCCACATT |
| | | | AGAGTCGGTCCTAACAAAATCTTGAGGAGCTCCACCACAGTCAAGGTTTTTGCT |
| | | | AAACCAGAAATCCCTGTGATTGTGGAAAATAACTCCACGGATGTCTTGGTAGAG |
| | | | AGAAGATTTACCTGCTTACTAAAGAATGTATTTCCCAAAGCAAATATCACATGGT |
| | | | TTATAGATGGAAGTTTTCTTCATGATGAAAAAGAAGGAATATATATTACTAATGA |
| | | | AGAGAGAAAAGGCAAAGATGGATTTTTGGAACTGAAGTCTGTTTTAACAAGGGT |
| | | | ACATAGTAATAAACCAGCCCAATCAGACAACTTGACCATTTGGTGTATGGCTCTG |
| | | | TCTCCAGTCCCAGGAAATAAAGTGTGGAACATCTCATCAGAAAAGATCACTTTTC |
| | | | TCTTAGGTTCTGAAATTTCCTCAACAGACCCTCCACTGAGTGTTACAGAATCTAC |
| | | | CCTTGACACCCAACCTTCTCCAGCCAGCAGTGTATCTCCTGCAAGATATCCAGCT |
| | | | ACATCTTCAGTGACCCTTGTAGATGTGAGTGCCTTGAGGCCAAACACCACTCCTC |
| | | | AACCCAGCAATTCCAGTATGACTACCCGAGGCTTCAACTATCCCTGGACCTCCAG |
| | | | TGGGACAGATACCAAAAAATCAGTTTCACGGATACCTAGTGAAACATACAGTTCA |
| | | | TCCCCGTCAGGTGCAGGCTCAACACTTCATGACAATGTCTTTACCAGCACAGCCA |
| | | | GAGCATTTTCAGAAGTCCCCACAACTGCCAATGGATCTACGAAAACTAATCACGT |
| | | | CCATATCACTGGTATTGTGGTCAATAAGCCCAAAGATGGAATGTCCTGGCCAGT |
| | | | GATTGTAGCAGCTTTACTCTTTTGCTGCATGATATTGTTTGGTCTTGGAGTGAG |
| | | | AAAATGGTGTCAGTACCAAAAAGAAATAATGGAAAGACCTCCACCTTTCAAGCCA |
| | | | CCACCACCTCCCATCAAGTACACTTGCATTCAAGAGCCCAACGAAAGTGATCTGC |
| | | | CTTATCATGAGATGGAGACCCTCTAGTCTCGTGAGACTTTGCCCCATGGCAGAA |
| | | | CTCTGCTGGAATCCTATTGAGAAGGTAGACATTGTGCTTTATTAATATAGTCGCT |
| | | | CTTCAGCCATGCCTTTGCTGCAGCTGAAATGGAAGTCAGAAGTGAGTGACCTGT |
| | | | TTTCCCAGCAACTCACCCTCTTCCATCTCCAAACGCCTGAAGCTTAACCAAGAGT |
| | | | GAGAGGATATGTCATGTTCACACTCAATGCAATTCGTAGTGGTTTTCTTGCTTAT |
| | | | GTAAGAAGTACATATTAGTCTGCCATCTTTAAAAAAAAATACAGTATTTTCATTT |
| | | | AAATTCTCTGATGGAGGGACAACAATGGTTTCAACTGTATGCCCATGCCTGATC |
| | | | CTCTTATTTGAACATCTATCAACATTGTAAACTCTTTGCCAAAATCCTGGGGCTT |
| | | | TGCTGCATTCCCTAAGATAATTACAGGAAAAAGAAAATGTAAAAGTGCTAACAAG |
| | | | GCTGCCAAGTAATGGAGAAGTATGGTTAGTCTTC |
| | | | ATATTGAAATTCTGTTGCTTATTTTCATGGAAGGAAACAGAATACTTTGCACAGG |
| | | | AACCACATTTTCAATCCTCCTTCACTGTCTTCCTACCATGTTCAGCCCAGACTCC |
| | | | TGCCACATGGACCAGGATGAAGAGGGATCAAAGAGATAATTAGCCAAAAACCCA |
| | | | GTAGCCTAGAAGATACAAAACTCCACTGGCCTCTAAAATTATATTAGCCAAGAGT |
| | | | GGTTTCATTTGAGTGCCTTCGTGTGTATGTCCATCAAACTGGAACCAAACTGTTT |
| | | | TGTAAGTAAACAGGCAGCCTAAGCCCAACCCTACTTTCTAATTCCAGTTATTCTC |
| | | | TTTTTCATCTGGGGATTTACCTGTTCATTTAATCTGCCTGTTTTGATCTGTTTTG |
| | | | AAAAAGATAAAGAGCCTCAAATCAGACCAGCACTGATTAATTAACCCTGCTCCTA |
| | | | CCAATCTTTTTTAAAGCAGTTGAAGCAGAATGTATAGGTGTCAGAGAAGAAACC |
| | | | TAGTCAGCCAGACGTGCTCTGTATTCAGCAATAGTTTGTGAATGAATAAATTACT |
| | | | AATCCTCCTTGTCGCTTGAAACCTTCCCACACTCCCTGCTCCAGGAGGGAAAAAC |
| | | | AGATGTTGTTGACAGATAGAGTGATAGGCAAATTCTGTGTGGACTTTAGTCCCA |
| | | | AAAGGAAACTTTAGTTCACTTGCAGTATGCTTATCCTTGACTGCACATGAGAATG |
| | | | CCTTGTGCAGAGTTATTTGGAGATTATGTCTTTTTCTTAAACACCATGGCTGTCA |
| | | | CACTTCAGTTCAATTAAATCAGAATGTCTGAGGAGTGAGACACAGGCATCAACA |
| | | | CTCTCAAATGATTCACATGTTCAGCCAAAGTTGAGAACCATCGAGCCTGTGGAA |
| | | | GTTCTTTCTCATGGCTCAGAATCTTAGGTAGGTGCTTAACTCTTGTGGTGGCCA |
| | | | GCCTCCAAGATGAGCCCCAGTGTTCTTGCCTCCTACTATTCACATCTTTATGTGG |
| | | | TCCCCTCCAATGCTGAATACAGATGATTTGTGTAACCTGAGGCCAGGATTAAGG |
| | | | GGAGGCAATCAATGCACCTAGGGAAAAAATTTAAGGAGGTATTCACACTCAGGG |
| | | | TCATGCACTTGCACAATGTTGAGAATGAGTACCACTCTCACCATTGGTATAGCCA |
| | | | AAAAAGCTTGGAAGTGACCAAGGCTAGGTCACAAAATACACTGTGGCTTCTTCT |
| | | | TTGATCTCTCTTTGACCATACTGACACTGGGAAAAGCCCATTCCCATGCCATGAA |
| | | | GACACCAAGGCAGCCCTATTGAGAAATCTACCTGTCGTGGCCGGGCGCAGTGGC |
| | | | TCACGCCTGTAATCCCAGCA |
| | | | CTTTGGGAGGCCGAGGTGGGTGGATCACGAGGTCAGGAGATCGAGACCATCCT |
| | | | GGCTAACACAGTGAAACCCCGTCTCTACTAAAAATACAAAAAATTAGCCGGGTGT |
| | | | GGTGTCGGGCACCTGTAGTCCCAGCTACTCAGGAGGCTGAGGCAGGAGAAGGG |
| | | | TGGGAACCCGGGAGGCAGAGCTTGCAGTGAGCCGAGATTGTGCCACTGCACAC |
| | | | TCCAATCTGGGTGAAAGACCGAGACTCCGCCTCAAAAAAAAAAAAAAAAGAAAG |
| | | | AAAGAAAGAAAGAAAGAAATCTACCTGTCAAGGAACTAAGGTATTTTGCTAACAA |
| | | | GCACCAACTTGCCAGCCATGTAAGGGAGCCATCTTGGAAGCAGATCCTCCAGCC |
| | | | TCCAGTCAAGTCTTCAGATAATTGCAACTTCAGTTGATCTTTTGACCAAGACCTC |
| | | | AAGAGAGCCAGAACTACCCAGCTAAGCCTTTTACTAAATTTCTGAACTTCTAACA |
| | | | CTATTAGATAATAAGTGCTTATTGTTTAACACCATTAATTTTGAGTATAATTTGT |
| | | | TACATAGCGACAGATAACTATACAGCTCAACAACTAGAAAAATAAACTGTTTACC |
| | | | TGCCTTAATTATTTATCTTTAGTTCTTATTAGTTCTCAAGAAACAAATGCTAGC |
| | | | TTCATATGTATGGCTGTTGCTTTGCTTCATGTGTATGGCTATTTGTATTTAACAA |
| | | | GACTTAATCATCAGTA |
| 595 | Human CD96 | Human CD96 amino acid | MEKKWKYCAVYYIIQIHFVKGVWEKTVNTEENVYATLGSDVNLTCQTQTVGFFVQ |
| | | sequence | MQWSKVTNKIDLIAVYHPQYGFYCAYGRPCESLVTFTETPENGSKINTLHLRNMSC |
| | | NCBI Accession number: | SVSGRYECMLVLYPEGIQTKIYNLLIQTHVTADEWNSNHTIEIEINQTLEIPCFQNSS |
| | | Transcript variant 3 | SKISSEFTYAWSVEDNGTQETLISQNHLISNSTLLKDRVKLGTDYRLHLSPVQIFDD |
| | | NM_001318889.1 | GRKFSCHIRVGPNKILRSSTTVKVFAKPEIPVIVENNSTDVLVERRFTCLLKNVFPKA |
| | | | NITWFIDGSFLHDEKEGIYITNEERKGKDGFLELKSVLTRVHSNKPAQSDNLTIWC |
| | | | MALSPVPGNKVWNISSEKITFLLGSEISSTDPPLSVTESTLDTQPSPASSVSPASKNV |
| | | | FTLSY |
| 596 | Human CD96 | Nucleotide sequence encoding | TTCCTGTCTACGTTTCATTTCCTGGGGGCTTGCCAAGTGATAAACAGACCCAGG |
| | | human CD96 | CGTGTGTGGTAGAGTTCGGGTTTTTTAGCACGAAGTGGGTGGCTGGAGTTTGC |
| | | NCBI Accession number: | TTGAAAACATCAATTGACTTTGTGATCATTACAGAAATGCTGGTGTAAGGTGTTC |
| | | Transcript variant 3 | AGAAGACAATGGAGAAAAAATGGAAATACTGTGCTGTCTATTACATCATCCAGA |
| | | NM_001318889.1 | TACATTTTGTCAAGGGAGTTTGGGAAAAAACAGTCAACACAGAAGAAAATGTTT |
| | | | ATGCTACACTTGGCTCTGATGTCAACCTGACCTGCCAAACACAGACAGTAGGCT |
| | | | TCTTCGTGCAGATGCAATGGTCCAAGGTCACCAATAAGATAGACCTGATTGCTG |
| | | | TCTATCATCCCCAATACGGCTTCTACTGTGCCTATGGGAGACCCTGTGAGTCACT |
| | | | TGTGACTTTCACAGAAACTCCTGAGAATGGGTCAAAATGGACTCTGCACTTAAG |
| | | | GAATATGTCTTGTTCAGTCAGTGGAAGGTACGAGTGTATGCTTGTTCTGTATCC |
| | | | AGAGGGCATTCAGACTAAAATCTACAACCTTCTCATTCAGACACACGTTACAGCA |
| | | | GATGAATGGAACAGCAACCATACGATAGAAATAGAGATAAATCAGACTCTGGAA |
| | | | ATACCATGCTTTCAAAATAGCTCCTCAAAAATTTCATCTGAGTTCACLTATGCAT |
| | | | GGTCGGTGGAGGATAATGGAACTCAGGAAACACTTATCTCCCAAAATCACCTCA |
| | | | TCAGCAATTCCACATTACTTAAAGATAGAGTCAAGCTTGGTACAGACTACAGACT |
| | | | CCACCTCTCTCCAGTCCAAATCTTCGATGATGGGCGGAAGTTCTCTTGCCACATT |
| | | | AGAGTCGGTCCTAACAAAATCTTGAGGAGCTCCACCACAGTCAAGGTTTTTGCT |
| | | | AAACCAGAAATCCCTGTGATTGTGGAAAATAACTCCACGGATGTCTTGGTAGAG |
| | | | AGAAGATTTACCTGCTTACTAAAGAATGTATTTCCCAAAGCAAATATCACATGGT |
| | | | TTATAGATGGAAGTTTTC |
| | | | TTCATGATGAAAAAGAAGGAATATATATTACTAATGAAGAGAGAAAAGGCAAAG |
| | | | ATGGATTTTTGGAACTGAAGTCTGTTTTAACAAGGGTACATAGTAATAAACCAG |
| | | | CCCAATCAGACAACTTGACCATTTGGTGTATGGCTCTGTCTCCAGTCCCAGGAAA |
| | | | TAAAGTGTGGAACATCTCATCAGAAAAGATCACTTTTCTCTTAGGTTCTGAAATT |
| | | | TCCTCAACAGACCCTCCACTGAGTGTTACAGAATCTACCCTTGACACCCAACCTT |
| | | | CTCCAGCCAGCAGTGTATCTCCTGCAAGTAAGAATGTTTTCACACTGAGCTATTG |
| | | | ATTTAACCAAGCAGATTGATAACGATAAAATTTCAGCAAACTTGCATCATTCATG |
| | | | CCTGTTTCTTAGCTATGACTTTTTTGGGGCTGAAATTGGGTTTTATTTTTTAACA |
| | | | GCTTTATTGAGATATAATTCACGTCACATTAACTTGCCCATTTAAAATGTATGAT |
| | | | CTAATGGTTTTTAGTATGTTCACAGACTTGTACAACCATGACTACAGCCAATTTC |
| | | | AGAACATTTTCATCATCTAATAAAGAAACTCCTAAACAAAAAAAAAAAAAAAA |
| 597 | KY01-CDRH1 (IMGT) | Amino Acid sequence of CDRH1 | GFTFDDYG |
| | of KY01 using IMGT | | |
| 598 | KY01-CDRH2 (IMGT) | Amino Acid sequence of CDRH2 | ISWNSVTI |
| | of KY01 using IMGT | | |
| 599 | KY01-CDRH3 IMGT) | Amino Acid sequence of CDRH3 | AKDGGLRYYYGMDV |
| | of KY01 using IMGT | | |
| 600 | KY01-CDRH1 (Kabat) | Amino Acid sequence of CDRH1 | DYGMY |
| | of KY01 using Kabat | | |
| 601 | KY01-CDRH2 (Kabat) | Amino Acid sequence of CDRH2 | GISWNSVTIGYADSVKG |
| | of KY01 using Kabat | | |
| 602 | KY01-CDRH3 (Kabat) | Amino Acid sequence of CDRH3 | DGGLRYYYGMDV |
| | of KY01 using Kabat | | |
| 603 | KY01-V_{H} | Amino acid sequence of KY01 | EVQLVESGGGLVQPGRSLRLSCAASGFTFDDYGMYWVRQTPGKGLEWVSGISWN |
| | | heavy chain variable region | SVTIGYADSVKGRFTISRDNAKNSLYLQMNSLRAEDTALYYCAKDGGLRYYYGMDV |
| | | | WGQGTKVTVSS |
| 604 | KY01-V_{H} | Nucleic acid sequence of KY01 | GAAGTGCAGCTGGTGGAGTCTGGGGGAGGCTTGGTACAGCCTGGCAGGTCCCT |
| | | heavy chain variable region | GAGACTCTCCTGTGCAGCCTCTGGATTCACCTTTGATGATTATGGCATGTACTG |
| | | | GGTCCGGCAAACTCCAGGGAAGGGCCTGGAGTGGGTCTCAGGTATTAGTTGGA |
| | | | ATAGTGTTACCATAGGCTATGCGGACTCTGTGAAGGGCCGATTCACCATCTCCA |
| | | | GAGACAACGCCAAGAACTCCCTGTATCTGCAAATGAACAGTCTGAGAGCTGAGG |
| | | | ACACGGCCITGTATTACTGTGCAAAAGATGGIGGCTTGAGGTATTACTACGGTA |
| | | | TGGACGTCTGGGGCCAAGGGACCAAGGTCACCGTCTCCTCA |
| 605 | KY01-heavy chain | Amino acid sequence of KY01 | EVQLVESGGGLVQPGRSLRLSCAASGFTFDDYGMYWVRQTPGKGLEWVSGISWN |
| | | heavy chain | SVTIGYADSVKGRFTISRDNAKNSLYLQMNSLRAEDTALYYCAKDGGLRYYYGMDV |
| | | | WGQGTKVTVSSASTKGPSVFPLAPCSRSTSESTAALGCLVKDYFPEPVTVSWNSGA |
| | | | LTSGVHTFPAVLQSSGLYSLSSVVTVPSSSLGTKTYTCNVDHKPSNTKVDKRVESKY |
| | | | GPPCPPCPAPEFEGGPSVFLFPPKPKDTLMISRTPEVTCVVVDVSQEDPEVQFNWY |
| | | | VDGVEVHNAKTKPREEQFNSTYRVVSVLTVLHQDWLNGKEYKCKVSNKGLPSSIEK |
| | | | TISKAKGQPREPQVYTLPPSQEEMTKNQVSLTCLVKGFYPSDIAVEWESNGQPENN |
| | | | YKTTPPVLDSDGSFFLYSRLTVDKSRWQEGNVFSCSVMHEALHNHYTQKSLSLSLG |
| | | | K |
| 606 | KY01-heavy chain | Nucleic acid sequence of KY01 | GaAGTGCAGCTGGTGGAGTCTGGGGGAGGCTTGGTACAGCCTGGCAGGTCCCT |
| | | heavy chain | GAGACTCTCCTGTGCAGCCTCTGGATTCACCTTTGATGATTATGGCATGTACTG |
| | | | GGTCCGGCAAACTCCAGGGAAGGGCCTGGAGTGGGTCTCAGGTATTAGTTGGA |
| | | | ATAGTGTTACCATAGGCTATGCGGACTCTGTGAAGGGCCGATTCACCATCTCCA |
| | | | GAGACAACGCCAAGAACTCCCTGTATCTGCAAATGAACAGTCTGAGAGCTGAGG |
| | | | ACACGGCCTTGTATTACTGTGCAAAAGATGGTGGCTTGAGGTATTACTACGGTA |
| | | | TGGACGTCTGGGGCCAAGGGACCAAGGTCACCGTCTCCTCAGCCAGCACCAAGG |
| | | | GCCCTTCCGTGTTCCCCCTGGCCCCTTGCAGCAGGAGCACCTCCGAATCCACAG |
| | | | CTGCCCTGGGCTGTCTGGTGAAGGACTACTTTCCCGAGCCCGTGACCGTGAGCT |
| | | | GGAACAGCGGCGCTCTGACATCCGGCGTCCACACCTTTCCTGCCGTCCTGCAGT |
| | | | CCTCCGGCCTCTACTCCCTGTCCTCCGTGGTGACCGTGCCTAGCTCCTCCCTCG |
| | | | GCACCAAGACCTACACCTGTAACGTGGACCACAAACCCTCCAACACCAAGGTGG |
| | | | ACAAACGGGTCGAGAGCAAGTACGGCCCTCCCTGCCCTCCTTGTCCTGCCCCCG |
| | | | AGTTCGAAGGCGGACCCAGCGTGTTCCTGTTCCCTCCTAAGCCCAAGGACACCC |
| | | | TCATGATCAGCCGGACACCCGAGGTGACCTGCGTGGTGGTGGATGTGAGCCAG |
| | | | GAGGACCCTGAGGTCCAGTTCAACTGGTATGTGGATGGCGTGGAGGTGCACAA |
| | | | CGCCAAGACAAAGCCCCGGGAAGAGCAGTTCAACTCCACCTACAGGGTGGTCAG |
| | | | CGTGCTGACCGTGCTGCATCAGGACTGGCTGAACGGCAAGGAGTACAAGTGCAA |
| | | | GGTCAGCAATAAGGGACTGCCCAGCAGCATCGAGAAGACCATCTCCAAGGCTAA |
| | | | AGGCCAGCCCCGGGAACCTCAGGTGTACACCCTGCCTCCCAGCCAGGAGGAGAT |
| | | | GACCAAGAACCAGGTGAGCCTGACCTGCCTGGTGAAGGGATTCTACCCTTCCGA |
| | | | CATCGCCGTGGAGTGGGAGTCCAACGGCCAGCCCGAGAACAATTATAAGACCAC |
| | | | CCCTCCCGTCCTCGACAGCGACGGATCCTTCTTTCTGTACTCCAGGCTGACCGT |
| | | | GGATAAGTCCAGGTGGCAGGAAGGCAACGTGTTCAGCTGCTCCGTGATGCACGA |
| | | | GGCCCTGCACAATCACTACACCCAGAAGTCCCTGAGCCTGTCCCTGGGAAAG |
| 607 | KY01-CDRL1 (IMGT) | Amino acid sequence of CDRL1 | QSLLHSNGYNY |
| | | of KY01 using IMGT | |
| 608 | KY01-CDRL2 (IMGT) | Amino acid sequence of CDRL2 | LDS |
| | | of KY01 using IMGT | |
| 609 | KY01-CDRL3 (IMGT) | Amino acid sequence of CDRL3 | MQALRTPLT |
| | | of KY01 using IMGT | |
| 610 | KY01-CDRL1 (Kabat) | Amino acid sequence of CDRL1 | RSSQSLLHSNGYNYLA |
| | | of KY01 using Kabat | |
| 611 | KY01-CDRL2 (Kabat) | Amino acid sequence of CDRL2 | LDSNRAS |
| | | of KY01 using Kabat | |
| 612 | KY01-CDRL3 (Kabat) | Amino acid sequence of CDRL3 | MQALRTPLT |
| | | of KY01 using Kabat | |
| 613 | KY01-V_{L} | Amino acid sequence of KY01 | DIVMTQSPLSLSVTPGESASISCRSSQSLLHSNGYNYLAWYLQKPGQSPQLLIYLDS |
| | | light chain variable region | NRASGVPDRFSGSGSGTDFTLKISRVEAEDVGIYYCMQALRTPLTFGGGTKVEIK |
| 614 | KY01-V_{L} | Nucleic acid sequence of KY01 | GATATTGTGATGACTCAGTCTCCACTCTCCCTGTCCGTCACCCCTGGAGAGTCG |
| | | light chain variable region | GCCTCCATCTCCTGCAGGTCTAGTCAGAGCCTCCTGCATAGTAATGGATACAACT |
| | | | ATTTGGCTTGGTACCTGCAGAAGCCAGGGCAGTCTCCACAGCTCCTGATCTATT |
| | | | TGGATTCTAATCGGGCCTCCGGGGTCCCTGACAGGTTCAGTGGCAGTGGATCAG |
| | | | GCACAGATTTTACACTGAAAATCAGCAGAGTGGAGGCTGAGGATGTTGGGATTT |
| | | | ATTACTGCATGCAAGCTCTGCGAACTCCGCTCACTTTCGGCGGAGGGACCAAGG |
| | | | TGGAGATCAAA |
| 615 | KY01-light chain | Amino acid sequence of KY01 | DIVMTQSPLSLSVTPGESASISCRSSQSLLHSNGYNYLAWYLQKPGQSPQLLIYLDS |
| | | light chain | NRASGVPDRFSGSGSGTDFTLKISRVEAEDVGIYYCMQALRTPLTFGGGTKVEIKR |
| | | | TVAAPSVFIFPPSDEQLKSGTASWCENNFYPREAKVQWKVDNALQSGNSQESVT |
| | | | EQDSKDSTYSLSSTLTLSKADYEKHKVYACEVTHQGLSSPVTKSFNRGEC |
| 616 | KY01-light chain | Nucleic acid sequence of KY01 | gATATTGTGATGACTCAGTCTCCACTCTCCCTGTCCGTCACCCCTGGAGAGTCG |
| | | light chain | GCCTCCATCTCCTGCAGGTCTAGTCAGAGCCTCCTGCATAGTAATGGATACAACT |
| | | | ATTTGGCTTGGTACCTGCAGAAGCCAGGGCAGTCTCCACAGCTCCTGATCTATT |
| | | | TGGATTCTAATCGGGCCTCCGGGGTCCCTGACAGGTTCAGTGGCAGTGGATCAG |
| | | | GCACAGATTTTACACTGAAAATCAGCAGAGTGGAGGCTGAGGATGTTGGGATTT |
| | | | ATTACTGCATGCAAGCTCTGCGAACTCCGCTCACTTTCGGCGGAGGGACCAAGG |
| | | | TGGAGATCAAACGTACGGTGGCCGCTCCCTCCGTGTTCATCTTCCCACCTTCCG |
| | | | ACGAGCAGCTGAAGTCCGGCACCGCTTCTGTCGTGTGCCTGCTGAACAACTTCT |
| | | | ACCCCCGCGAGGCCAAGGTGCAGTGGAAGGTGGACAACGCCCTGCAGTCCGGC |
| | | | AACTCCCAGGAATCCGTGACCGAGCAGGACTCCAAGGACAGCACCTACTCCCTG |
| | | | TCCTCCACCCTGACCCTGTCCAAGGCCGACTACGAGAAGCACAAGGTGTACGCC |
| | | | TGCGAAGTGACCCACCAGGGCCTGTCTAGCCCCGTGACCAAGTCTTTCAACCGG |
| | | | GGCGAGTGT |
| 617 | KY02-CDRH1 (IMGT) | Amino Acid sequence of CDRH1 | GFTFSDYY |
| | | of KY02 using IMGT | |
| 618 | KY02-CDRH2 (IMGT) | Amino Acid sequence of CDRH2 | ISSSGSTV |
| | | of KY02 using IMGT | |
| 619 | KY02-CDRH3 (IMGT) | Amino Acid sequence of CDRH3 | ARDRGFGESYCFDY |
| | | of KY02 using IMGT | |
| 620 | KY02-CDRH1 (Kabat) | Amino Acid sequence of CDRH1 | DYYMS |
| | | of KY02 using Kabat | |
| 621 | KY02-CDRH2 (Kabat) | Amino Acid sequence of CDRH2 | YISSSGSTVYSADSVKG |
| | | of KY02 using Kabat | |
| 622 | KY02-CDRH3 (Kabat) | Amino Acid sequence of CDRH3 | DRGFGESYCFDY |
| | | of KY02 using Kabat | |
| 623 | KY02-V_{H} | Amino acid sequence of KY02 | QVPLVESGGGLVRPGGSLRLSCAASGFTFSDYYMSWIRQAPGKGLEWVSYISSSGS |
| | | heavy chain variable region | TVYSADSVKGRFTVSRDNAKSSLLLHMNSLRAEDTAIYYCARDRGFGESYCFDYW |
| | | | GQGTLVTVSS |
| 624 | KY02-V_{H} | Nucleic acid sequence of KY02 | CAGGTGCCGCTGGTGGAGTCTGGGGGAGGCTTGGTCAGGCCTGGAGGGTCCCT |
| | | heavy chain variable region | GAGACTCTCCTGTGCAGCCTCTGGATTCACCTTCAGTGACTACTACATGAGCTG |
| | | | GATCCGCCAGGCTCCAGGGAAGGGGCTGGAGTGGGTTTCATACATTAGTAGTA |
| | | | GTGGTAGTACCGTGTATTCCGCAGACTCTGTGAAGGGCCGATTCACCGTCTCCA |
| | | | GGGACAACGCCAAGAGCTCACTGCTTCTGCACATGAACAGCCTGAGAGCCGAGG |
| | | | ACACGGCCATATATTACTGTGCGAGAGATAGAGGGTTCGGGGAGTCCTATTGCT |
| | | | TTGACTACTGGGGCCAGGGAACCCTGGTCACCGTCTCCTCA |
| 625 | KY02- | Amino acid sequence of KY02 | QVPLVESGGGLVRPGGSLRLSCAASGFTFSDYYMSWIRQAPGKGLEWVSYISSSGS |
| | heavy chain | heavy chain | TVYSADSVKGRFTVSRDNAKSSLEHMNSLRAEDTAIYYCARDRGFGESYCFDYW |
| | | | GQGTLVTVSSASTKGPSVFPLAPCSRSTSESTAALGCLVKDYFPEPVTVSWNSGALT |
| | | | SGVHTFPAVLQSSGLYSLSSVVTVPSSSLGTKTYTCNVDHKPSNTKVDKRVESKYG |
| | | | PPCPPCPAPEFEGGPSVFLFPPKPKDTLMISRTPEVTCVVVDVSQEDPEVQFNWYV |
| | | | DGVEVHNAKTKPREEQFNSTYRWSVLTVLHQDWLNGKEYKCKVSNKGLPSSIEKT |
| | | | ISKAKGQPREPQVYTLPPSQEEMTKNQVSLTCLVKGFYPSDIAVEWESNGQPENNY |
| | | | KTTPPVLDSDGSFFLYSRLTVDKSRWQEGNVFSCSVMHEALHNHYTQKSLSLSLGK |
| 626 | KY02- | Nucleic acid sequence of KY02 | CAGGTGCCGCTGGTGGAGTCTGGGGGAGGCTTGGTCAGGCCTGGAGGGTCCCT |
| | heavy chain | heavy chain | GAGACTCTCCTGTGCAGCCTCTGGATTCACCTTCAGTGACTACTACATGAGCTG |
| | | | GATCCGCCAGGCTCCAGGGAAGGGGCTGGAGTGGGTTTCATACATTAGTAGTA |
| | | | GTGGTAGTACCGTGTATTCCGCAGACTCTGTGAAGGGCCGATTCACCGTCTCCA |
| | | | GGGACAACGCCAAGAGCTCACTGCTTCTGCACATGAACAGCCTGAGAGCCGAGG |
| | | | ACACGGCCATATATTACTGTGCGAGAGATAGAGGGTTCGGGGAGTCCTATTGCT |
| | | | TTGACTACTGGGGCCAGGGAACCCTGGTCACCGTCTCCTCAGCCAGCACCAAGG |
| | | | GCCCTTCCGTGTTCCCCCTGGCCCCTTGCAGCAGGAGCACCTCCGAATCCACAG |
| | | | CTGCCCTGGGCTGTCTGGTGAAGGACTACTTTCCCGAGCCCGTGACCGTGAGCT |
| | | | GGAACAGCGGCGCTCTGACATCCGGCGTCCACACCTTTCCTGCCGTCCTGCAGT |
| | | | CCTCCGGCCTCTACTCCCTGTCCTCCGTGGTGACCGTGCCTAGCTCCTCCCTCG |
| | | | GCACCAAGACCTACACCTGTAACGTGGACCACAAACCCTCCAACACCAAGGTGG |
| | | | ACAAACGGGTCGAGAGCAAGTACGGCCCTCCCTGCCCTCCTTGTCCTGCCCCCG |
| | | | AGTTCGAAGGCGGACCCAGCGTGTTCCTGTTCCCTCCTAAGCCCAAGGACACCC |
| | | | TCATGATCAGCCGGACACCCGAGGTGACCTGCGTGGTGGTGGATGTGAGCCAG |
| | | | GAGGACCCTGAGGTCCAGTTCAACTGGTATGTGGATGGCGTGGAGGTGCACAA |
| | | | CGCCAAGACAAAGCCCCGGGAAGAGCAGTTCAACTCCACCTACAGGGTGGTCAG |
| | | | CGTGCTGACCGTGCTGCATCAGGACTGGCTGAACGGCAAGGAGTACAAGTGCAA |
| | | | GGTCAGCAATAAGGGACTGCCCAGCAGCATCGAGAAGACCATCTCCAAGGCTAA |
| | | | AGGCCAGCCCCGGGAACCTCAGGTGTACACCCTGCCTCCCAGCCAGGAGGAGAT |
| | | | GACCAAGAACCAGGTGAGCCTGACCTGCCTGGTGAAGGGATTCTACCCTTCCGA |
| | | | CATCGCCGTGGAGTGGGAGTCCAACGGCCAGCCCGAGAACAATTATAAGACCAC |
| | | | CCCTCCCGTCCTCGACAGCGACGGATCCTTCTTTCTGTACTCCAGGCTGACCGT |
| | | | GGATAAGTCCAGGTGGCAGGAAGGCAACGTGTTCAGCTGCTCCGTGATGCACGA |
| | | | GGCCCTGCACAATCACTACACCCAGAAGTCCCTGAGCCTGTCCCTGGGAAAG |
| 627 | KY02- | Amino acid sequence of CDRL1 | QNIRSY |
| | CDRL1 (IMGT) | of KY02 using IMGT | |
| 628 | KY02- | Amino acid sequence of CDRL2 | TAS |
| | CDRL2 (IMGT) | of KY02 using IMGT | |
| 629 | KY02- | Amino acid sequence of CDRL3 | QQSYSIPCS |
| | CDRL3 (IMGT) | of KY02 using IMGT | |
| 630 | KY02- | Amino acid sequence of CDRL1 | RASQNIRSYLT |
| | CDRL1 (Kabat) | of KY02 using Kabat | |
| 631 | KY02- | Amino acid sequence of CDRL2 | TASSLQS |
| | CDRL2 (Kabat) | of KY02 using Kabat | |
| 632 | KY02- | Amino acid sequence of CDRL3 | QQSYSIPCS |
| | CDRL3 (Kabat) | of KY02 using Kabat | |
| 633 | KY02- | Amino acid sequence of KY02 | DIQMTQSPSSLSASVGDRVTITCRASQNIRSYLTWYQQKPGKAPKLLIYTASSLQS |
| | V_{L} | light chain variable region | GVPSRFSGSGSGTDFTLTISSLQPEDFATYYCQQSYSIPCSFGQGTKLEIK |
| 634 | KY02- | Nucleic acid sequence of KY02 | GACATCCAGATGACCCAGTCTCCATCCTCCCTGTCTGCATCTGTAGGAGACAGA |
| | V_{L} | light chain variable region | GTCACCATCACTTGCCGGGCAAGTCAGAACATTAGGAGTTATTTAACTTGGTAT |
| | | | CAGCAGAAACCAGGGAAAGCCCCTAAGCTCCTGATCTATACTGCATCCAGTTTAC |
| | | | AAAGTGGGGTCCCATCAAGGTTCAGTGGCAGTGGATCTGGGACAGATTTCACTC |
| | | | TCACCATCAGCAGTCTGCAACCTGAAGATTTTGCAACTTATTACTGTCAACAGAG |
| | | | TTACAGTATCCCGTGCAGTTTTGGCCAGGGGACCAAGCTGGAGATCAAA |
| 635 | KY02- | Amino acid sequence of KY02 | DIQMTQSPSSLSASVGDRVTITCRASQNIRSYLTWYQQKPGKAPKLLIYTASSLQS |
| | light chain | light chain | GVPSRFSGSGSGTDFILTISSLQPEDFATYYCQQSYSIPCSFGQGTKLEIKRIVAAP |
| | | | SVFIFPPSDEQLKSGTASVVCLLNNFYPREAKWWKVDNALQSGNSQESVTEQDSK |
| | | | DSTYSLSSTLTLSKADYEKHKVYACEVTHQGLSSPVTKSFNRGEC |
| 636 | KY02- | Nucleic acid sequence of KY02 | GACATCCAGATGACCCAGTCTCCATCCTCCCTGTCTGCATCTGTAGGAGACAGA |
| | light chain | light chain | GTCACCATCACTTGCCGGGCAAGTCAGAACATTAGGAGTTATTTAACTTGGTAT |
| | | | CAGCAGAAACCAGGGAAAGCCCCTAAGCTCCTGATCTATACTGCATCCAGTTTAC |
| | | | AAAGTGGGGTCCCATCAAGGTTCAGTGGCAGTGGATCTGGGACAGATTTCACTC |
| | | | TCACCATCAGCAGTCTGCAACCTGAAGATTTTGCAACTTATTACTGTCAACAGAG |
| | | | TTACAGTATCCCGTGCAGTTTTGGCCAGGGGACCAAGCTGGAGATCAAACGTAC |
| | | | GGTGGCCGCTCCCTCCGTGTTCATCTTCCCACCTTCCGACGAGCAGCTGAAGTC |
| | | | CGGCACCGCTTCTGTCGTGTGCCTGCTGAACAACTTCTACCCCCGCGAGGCCAA |
| | | | GGTGCAGTGGAAGGTGGACAACGCCCTGCAGTCCGGCAACTCCCAGGAATCCGT |
| | | | GACCGAGCAGGACTCCAAGGACAGCACCTACTCCCTGTCCTCCACCCTGACCCT |
| | | | GTCCAAGGCCGACTACGAGAAGCACAAGGTGTACGCCTGCGAAGTGACCCACCA |
| | | | GGGCCTGTCTAGCCCCGTGACCAAGTCTTTCAACCGGGGCGAGTGT |
| 637 | KY03-CDRH1 (IMGT) | Amino Acid sequence of CDRH1 | GFTFSNAW |
| | | of KY03 using IMGT | |
| 638 | KY03-CDRH2 (IMGT) | Amino Acid sequence of CDRH2 | IKSKANGGTT |
| | | of KY03 using IMGT | |
| 639 | KY03-CDRH3 (IMGT) | Amino Acid sequence of CDRH3 | VIDPLYDILTGY |
| | | of KY03 using IMGT | |
| 640 | KY03-CDRH1 (Kabat) | Amino Acid sequence of CDRH1 | NAWMS |
| | | of KY03 using Kabat | |
| 641 | KY03-CDRH2 (Kabat) | Amino Acid sequence of CDRH2 | RIKSKANGGTTDYAAPVKG |
| | | of KY03 using IMGT | |
| 642 | KY03-CDRH3 (Kabat) | Amino Acid sequence of CDRH3 | DPLYDILTGY |
| | | of KY03 using IMGT | |
| 643 | KY03- | Amino acid sequence of KY03 | EVQLVESGGDLVKPGGSLRLSCAASGFTFSNAWMSWVRQAPGKGLEWVGRIKSK |
| | V_{H} | heavy chain variable region | ANGGITDYAAPVKGSFTISRDDSKNTLYLQMSSLKTEDTAVYYCVIDPLYDILTGY |
| | | | WGRGTLVTVSS |
| 644 | KY03- | Nucleic acid sequence of KY03 | GAGGTGCAGCTGGTGGAGTCTGGGGGAGACTTGGTCAAGCCTGGGGGGTCCCT |
| | V_{H} | heavy chain variable region | TAGACTCTCCTGTGCAGCCTCTGGATTCACTTTCAGTAACGCCTGGATGAGCTG |
| | | | GGTCCGCCAGGCTCCAGGGAAGGGGCTGGAGTGGGTTGGCCGTATTAAAAGCA |
| | | | AAGCTAATGGTGGAACAACAGACTACGCTGCACCCGTGAAAGGCAGTTTCACCA |
| | | | TCTCAAGAGATGATTCAAAAAACACGCTGTATCTGCAAATGAGCAGCCTGAAAAC |
| | | | CGAGGACACAGCCGTGTATTATTGTGTTATAGACCCCCTTTACGATATTTTGACT |
| | | | GGATACTGGGGCCGGGGAACCCTGGTCACCGTCTCCTCA |
| 645 | KY03- | Amino acid sequence of KY03 | EVQLVESGGDLVKPGGSLRLSCAASGFTFSNAWMSWVRQAPGKGLEWVGRIKSK |
| | heavy chain | heavy chain | ANGGTTDYAAPVKGSFTISRDDSKNTLYLQMSSLKTEDTAVYYCVIDPLYDILTGY |
| | | | WGRGTLVTVSSASTKGPSVFPLAPCSRSTSESTAALGCLVKDYFPEPVTVSWNSGA |
| | | | LTSGVHTFPAVLQSSGLYSLSSVVTVPSSSLGTKTYTCNVDHKPSNTKVDKRVESKY |
| | | | GPPCPPCPAPEFEGGPSVFLFPPKPKDILMISRTPEVTCVVVDVSQEDPEVQFNWY |
| | | | VDGVEVHNAKTKPREEQFNSTYRVVSVLTVLHQDWLNGKEYKCKVSNKGLPSSIEK |
| | | | TISKAKGQPREPQVYTLPPSQEEMTKNQVSLTCLVKGFYPSDIAVEWESNGQPENN |
| | | | YKTTPPVLDSDGSFFLYSRLTVDKSRWQEGNVFSCSVMHEALHNHYTQKSLSLSLG |
| | | | K |
| 646 | KY03- | Nucleic acid sequence of KY03 | GAGGTGCAGCTGGTGGAGTCTGGGGGAGACTTGGTCAAGCCTGGGGGGTCCCT |
| | heavy chain | heavy chain | TAGACTCTCCTGTGCAGCCTCTGGATTCACTTTCAGTAACGCCTGGATGAGCTG |
| | | | GGTCCGCCAGGCTCCAGGGAAGGGGCTGGAGTGGGTTGGCCGTATTAAAAGCA |
| | | | AAGCTAATGGTGGAACAACAGACTACGCTGCACCCGTGAAAGGCAGTTTCACCA |
| | | | TCTCAAGAGATGATTCAAAAAACACGCTGTATCTGCAAATGAGCAGCCTGAAAAC |
| | | | CGAGGACACAGCCGTGTATTATTGTGTTATAGACCCCCTTTACGATATTTTGACT |
| | | | GGATACTGGGGCCGGGGAACCCTGGTCACCGTCTCCTCAGCCAGCACCAAGGGC |
| | | | CCTTCCGTGTTCCCCCTGGCCCCTTGCAGCAGGAGCACCTCCGAATCCACAGCT |
| | | | GCCCTGGGCTGTCTGGTGAAGGACTACTTTCCCGAGCCCGTGACCGTGAGCTGG |
| | | | AACAGCGGCGCTCTGACATCCGGCGTCCACACCTTTCCTGCCGTCCTGCAGTCC |
| | | | TCCGGCCTCTACTCCCTGTCCTCCGTGGTGACCGTGCCTAGCTCCTCCCTCGGC |
| | | | ACCAAGACCTACACCTGTAACGTGGACCACAAACCCTCCAACACCAAGGTGGACA |
| | | | AACGGGTCGAGAGCAAGTACGGCCCTCCCTGCCCTCCTTGTCCTGCCCCCGAGT |
| | | | TCGAAGGCGGACCCAGCGTGTTCCTGTTCCCTCCTAAGCCCAAGGACACCCTCA |
| | | | TGATCAGCCGGACACCCGAGGTGACCTGCGTGGTGGTGGATGTGAGCCAGGAG |
| | | | GACCCTGAGGTCCAGTTCAACTGGTATGTGGATGGCGTGGAGGTGCACAACGCC |
| | | | AAGACAAAGCCCCGGGAAGAGCAGTTCAACTCCACCTACAGGGTGGTCAGCGTG |
| | | | CTGACCGTGCTGCATCAGGACTGGCTGAACGGCAAGGAGTACAAGTGCAAGGTC |
| | | | AGCAATAAGGGACTGCCCAGCAGCATCGAGAAGACCATCTCCAAGGCTAAAGGC |
| | | | CAGCCCCGGGAACCTCAGGTGTACACCCTGCCTCCCAGCCAGGAGGAGATGACC |
| | | | AAGAACCAGGTGAGCCTGACCTGCCTGGTGAAGGGATTCTACCCTTCCGACATC |
| | | | GCCGTGGAGTGGGAGTCCAACGGCCAGCCCGAGAACAATTATAAGACCACCCCT |
| | | | CCCGTCCTCGACAGCGACGGATCCTTCTTTCTGTACTCCAGGCTGACCGTGGAT |
| | | | AAGTCCAGGTGGCAGGAAGGCAACGTGTTCAGCTGCTCCGTGATGCACGAGGC |
| | | | CCTGCACAATCACTACACCCAGAAGTCCCTGAGCCTGTCCCTGGGAAAG |
| 647 | KY03- | Amino acid sequence of CDRL1 | KLGDKY |
| | CDRL1 (IMGT) | of KY03 using IMGT | |
| 648 | KY03- | Amino acid sequence of CDRL2 | QDS |
| | CDRL2 (IMGT) | of KY03 using IMGT | |
| 649 | KY03- | Amino acid sequence of CDRL3 | QAWDSSTAV |
| | CDRL3 (IMGT) | of KY03 using IMGT | |
| 650 | KY03- | Amino acid sequence of CDRL1 | SGDKLGDKYAC |
| | CDRL1 (Kabat) | of KY03 using Kabat | |
| 651 | KY03- | Amino acid sequence of CDRL2 | QDSKRPS |
| | CDRL2 (Kabat) | of KY03 using Kabat | |
| 652 | KY03- | Amino acid sequence of CDRL3 | QAWDSSTAV |
| | CDRL3 (Kabat) | of KY03 using Kabat | |
| 653 | KY03- | Amino acid sequence of KY03 | SYDLTQPPSVSVSPGQTASITCSGDKLGDKYACWYQQKPGQSPVLVIYQDSKRPS |
| | V_{L} | light chain variable region | GIPERFSGSNSGNTATLTISGTQAMDEADYYCQAWDSSTAVFGGGTKLTVL |
| 654 | KY03- | Nucleic acid sequence of KY03 | TCCTATGACCTGACTCAGCCACCCTCAGTGTCCGTGTCCCCAGGACAGACAGCC |
| | V_{L} | light chain variable region | AGCATCACCTGCTCTGGAGATAAATTGGGGGATAAATATGCTTGTTGGTATCAG |
| | | | CAGAAGCCAGGCCAGTCCCCTGTGCTGGTCATCTATCAAGATAGTAAGCGGCCC |
| | | | TCAGGGATCCCTGAGCGATTCTCTGGCTCCAATTCTGGGAACACAGCCACTCTG |
| | | | ACCATCAGCGGGACCCAGGCTATGGATGAGGCTGACTATTACTGTCAGGCGTGG |
| | | | GACAGCAGCACTGCGGTTTTCGGCGGAGGGACCAAGCTGACCGTCCTA |
| 655 | KY03- | Amino acid sequence of KY03 | SYDLTQPPSVSVSPGQTASITCSGDKLGDKYACWYQQKPGQSPVLVIYQDSKRPS |
| | light chain | light chain | GIPERFSGSNSGNTATLTISGTQAMDEADYYCQAWDSSTAVFGGGTKLTVLGQPK |
| | | | AAPSVTLFPPSSEELQANKATLVCLISDFYPGAVTVAWKADSSPVKAGVETTTPSKQ |
| | | | SNNKYAASSYLSLTPEQWKSHRSYSCQVTHEGSTVEKTVAPTECS |
| 656 | KY03- | Nucleic acid sequence of KY03 | TCCTATGACCTGACTCAGCCACCCTCAGTGTCCGTGTCCCCAGGACAGACAGCC |
| | light chain | light chain | AGCATCACCTGCTCTGGAGATAAATTGGGGGATAAATATGCTTGTTGGTATCAG |
| | | | CAGAAGCCAGGCCAGTCCCCTGTGCTGGTCATCTATCAAGATAGTAAGCGGCCC |
| | | | TCAGGGATCCCTGAGCGATTCTCTGGCTCCAATTCTGGGAACACAGCCACTCTG |
| | | | ACCATCAGCGGGACCCAGGCTATGGATGAGGCTGACTATTACTGTCAGGCGTGG |
| | | | GACAGCAGCACTGCGGTTTTCGGCGGAGGGACCAAGCTGACCGTCCTAGGTCA |
| | | | GCCCAAGGCTGCCCCCTCGGTCACTCTGTTCCCGCCCTCCTCTGAGGAGCTTCA |
| | | | AGCCAACAAGGCCACACTGGTGTGTCTCATAAGTGACTTCTACCCGGGAGCCGT |
| | | | GACAGTGGCCTGGAAGGCAGATAGCAGCCCCGTCAAGGCGGGAGTGGAGACCA |
| | | | CCACACCCTCCAAACAAAGCAACAACAAGTACGCGGCCAGCAGCTATCTGAGCCT |
| | | | GACGCCTGAGCAGTGGAAGTCCCACAGAAGCTACAGCTGCCAGGTCACGCATGA |
| | | | AGGGAGCACCGTGGAGAAGACAGTGGCCCCTACAGAATGTTCA |
| 657 | KY04-CDRH1 (IMGT) | Amino Acid sequence of CDRH1 | GDSISSSNW |
| | | of KY04 using IMGT | |
| 658 | KY04-CDRH2 (IMGT) | Amino Acid sequence of CDRH2 | IYHSGNT |
| | | of KY04 using IMGT | |
| 659 | KY04-CDRH3 (IMGT) | Amino Acid sequence of CDRH3 | ARARVYDILTGRGYYGMDV |
| | | of KY04 using IMGT | |
| 660 | KY04-CDRH1 (Kabat) | Amino Acid sequence of CDRH1 | SSNWWS |
| | | of KY04 using Kabat | |
| 661 | KY04-CDRH2 (Kabat) | Amino Acid sequence of CDRH2 | EIYHSGNTNYNPSLKS |
| | | of KY04 using Kabat | |
| 662 | KY04-CDRH3 (Kabat) | Amino Acid sequence of CDRH3 | ARVYDILTGRGYYGMDV |
| | | of KY04 using Kabat | |
| 663 | KY04- | Amino acid sequence of KY04 | QVQLQESGPGLVRPSGTLSLTCAVSGDSISSSNWWSWVRQPPGKGLEWIGEIYHS |
| | V_{H} | heavy chain variable region | GNTNYNPSLKSRGTISVDKSKNQFSLKLTSITAADTAVYYCARARVYDILTGRGYYG |
| | | | MDVWGQGTTVTVSS |
| 664 | KY04- | Nucleic acid sequence of KY04 | CAGGTGCAGCTGCAGGAGTCGGGCCCAGGACTGGTGAGGCCTTCGGGGACCCT |
| | V_{H} | heavy chain variable region | GTCCCTCACCTGCGCTGTCTCTGGTGACTCCATCAGCAGTAGTAACTGGTGGAG |
| | | | TTGGGTCCGCCAGCCCCCAGGGAAGGGGCTGGAGTGGATTGGGGAAATCTATC |
| | | | ATAGTGGGAACACCAACTACAATCCGTCCCTCAAGAGTCGAGGCACCATTTCAG |
| | | | TAGACAAGTCCAAGAACCAGTTCTCCCTGAAGCTGACCTCTATAACCGCCGCGG |
| | | | ACACGGCCGTATATTACTGTGCGAGAGCGAGGGTTTACGATATTTTGACTGGTC |
| | | | GAGGTTACTACGGTATGGACGTCTGGGGCCAAGGGACCACGGTCACCGTCTCCT |
| | | | CA |
| 665 | KY04- | Amino acid sequence of KY04 | QVQLQESGPGLVRPSGTLSLTCAVSGDSISSSNWWSWVRQPPGKGLEWIGEIYHS |
| | heavy chain | heavy chain | GNTNYNPSLKSRGTISVDKSKNQFSLKLTSITAADTAVYYCARARVYDILTGRGYYG |
| | | | MDVWGQGTTVTVSSASTKGPSVFPLAPCSRSTSESTAALGCLVKDYFPEPVTVSW |
| | | | NSGALTSGVHTFPAVLQSSGLYSLSSVVTVPSSSLGTKTYTCNVDHKPSNTINDKR |
| | | | VESKYGPPCPPCPAPEFEGGPSVFLFPPKPKDTLMISRTPEVTCVVVDVSQEDPEVQ |
| | | | FNWYVDGVEVHNAKTKPREEQFNSTYRVVSVLTVLHQDWLNGKEYKCKVSNKGL |
| | | | PSSIEKTISKAKGQPREPQVYTLPPSQEEMTKNQVSLTCLVKGFYPSDIAVEWESNG |
| | | | QPENNYKTTPPVLDSDGSFFLYSRLTVDKSRWQEGNVFSCSVMHEALHNHYTQKS |
| | | | LSLSLGK |
| 666 | KY04- | Nucleic acid sequence of KY04 | CAGGTGCAGCTGCAGGAGTCGGGCCCAGGACTGGTGAGGCCTTCGGGGACCCT |
| | heavy chain | heavy chain | GTCCCTCACCTGCGCTGTCTCTGGTGACTCCATCAGCAGTAGTAACTGGTGGAG |
| | | | TTGGGTCCGCCAGCCCCCAGGGAAGGGGCTGGAGTGGATTGGGGAAATCTATC |
| | | | ATAGTGGGAACACCAACTACAATCCGTCCCTCAAGAGTCGAGGCACCATTTCAG |
| | | | TAGACAAGTCCAAGAACCAGTTCTCCCTGAAGCTGACCTCTATAACCGCCGCGG |
| | | | ACACGGCCGTATATTACTGTGCGAGAGCGAGGGTTTACGATATTTTGACTGGTC |
| | | | GAGGTTACTACGGTATGGACGTCTGGGGCCAAGGGACCACGGTCACCGTCTCCT |
| | | | CAGCCAGCACCAAGGGCCCTTCCGTGTTCCCCCTGGCCCCTTGCAGCAGGAGCA |
| | | | CCTCCGAATCCACAGCTGCCCTGGGCTGTCTGGTGAAGGACTACTTTCCCGAGC |
| | | | CCGTGACCGTGAGCTGGAACAGCGGCGCTCTGACATCCGGCGTCCACACCTTTC |
| | | | CTGCCGTCCTGCAGTCCTCCGGCCTCTACTCCCTGTCCTCCGTGGTGACCGTGC |
| | | | CTAGCTCCTCCCTCGGCACCAAGACCTACACCTGTAACGTGGACCACAAACCCTC |
| | | | CAACACCAAGGTGGACAAACGGGTCGAGAGCAAGTACGGCCCTCCCTGCCCTCC |
| | | | TTGTCCTGCCCCCGAGTTCGAAGGCGGACCCAGCGTGTTCCTGTTCCCTCCTAA |
| | | | GCCCAAGGACACCCTCATGATCAGCCGGACACCCGAGGTGACCTGCGTGGTGGT |
| | | | GGATGTGAGCCAGGAGGACCCTGAGGTCCAGTTCAACTGGTATGTGGATGGCG |
| | | | TGGAGGTGCACAACGCCAAGACAAAGCCCCGGGAAGAGCAGTTCAACTCCACCT |
| | | | ACAGGGTGGTCAGCGTGCTGACCGTGCTGCATCAGGACTGGCTGAACGGCAAG |
| | | | GAGTACAAGTGCAAGGTCAGCAATAAGGGACTGCCCAGCAGCATCGAGAAGACC |
| | | | ATCTCCAAGGCTAAAGGCCAGCCCCGGGAACCTCAGGTGTACACCCTGCCTCCC |
| | | | AGCCAGGAGGAGATGACCAAGAACCAGGTGAGCCTGACCTGCCTGGTGAAGGG |
| | | | ATTCTACCCTTCCGACATCGCCGTGGAGTGGGAGTCCAACGGCCAGCCCGAGAA |
| | | | CAATTATAAGACCACCCCTCCCGTCCTCGACAGCGACGGATCCTTCTTTCTGTAC |
| | | | TCCAGGCTGACCGTGGATAAGTCCAGGTGGCAGGAAGGCAACGTGTTCAGCTGC |
| | | | TCCGTGATGCACGAGGCCCTGCACAATCACTACACCCAGAAGTCCCTGAGCCTG |
| | | | TCCCTGGGAAAG |
| 667 | KY04- | Amino acid sequence of CDRL1 | ALPKKY |
| | CDRL1 (IMGT) | of KY04 using IMGT | |
| 668 | KY04- | Amino acid sequence of CDRL2 | EDR |
| | CDRL2 (IMGT) | of KY04 using IMGT | |
| 669 | KY04- | Amino acid sequence of CDRL3 | FSTDSSGNPRV |
| | CDRL3 (IMGT) | of KY04 using IMGT | |
| 670 | KY04- | Amino acid sequence of CDRL1 | SGDALPKKYAY |
| | CDRL1 (Kabat) | of KY04 using Kabat | |
| 671 | KY04- | Amino acid sequence of CDRL2 | EDRKRPS |
| | CDRL2 (Kabat) | of KY04 using Kabat | |
| 672 | KY04- | Amino acid sequence of CDRL3 | FSTDSSGNPRV |
| | CDRL3 (Kabat) | of KY04 using Kabat | |
| 673 | KY04- | Amino acid sequence of KY04 | SYELTQPPSVSVSPGQTARITCSGDALPKKYAYWYQQKSGQAPVLVIHEDRKRPSG |
| | V_{L} | light chain variable region | IPERFSGSSSGTMATLTISGAQVEDEADYYCFSTDSSGNPRVFGGGTKLTVL |
| 674 | KY04- | Nucleic acid sequence of KY04 | TCCTATGAGCTGACACAGCCACCCTCGGTGTCAGTGTCCCCAGGACAAACGGCC |
| | V_{L} | light chain variable region | AGGATCACCTGCTCTGGAGATGCATTGCCAAAAAAGTATGCTTATTGGTACCAG |
| | | | CAGAAGTCAGGCCAGGCCCCTGTTCTGGTCATCCATGAGGACAGGAAACGACCC |
| | | | TCCGGGATCCCTGAGAGATTCTCTGGCTCCAGCTCAGGGACAATGGCCACCTTG |
| | | | ACTATCAGTGGGGCCCAGGTGGAGGATGAAGCTGACTACTACTGTTTCTCAACA |
| | | | GACAGCAGTGGTAATCCTAGGGTGTTCGGCGGAGGGACCAAGCTGACCGTCCTA |
| 675 | KY04- | Amino acid sequence of KY04 | SYELTQPPSVSVSPGQTARITCSGDALPKKYAYWYQQKSGQAPVLVIHEDRKRPSG |
| | light chain | light chain | IPERFSGSSSGTMATLTISGAQVEDEADYYCFSTDSSGNPRVFGGGTKLTVLGQPK |
| | | | AAPSVTLFPPSSEELQANKATLVCLISDFYPGAVTVAWKADSSPVKAGVETTTPSKQ |
| | | | SNNKYAASSYLSLTPEQWKSHKSYSCQVTHEGSTVEKTVAPTECS |
| 676 | KY04- | Nucleic acid sequence of KY04 | TCTGAGGCCTCCTATGAGCTGACACAGCCACCCTCGGTGTCAGTGTCCCCAGGA |
| | light chain | light chain | CAAACGGCCAGGATCACCTGCTCTGGAGATGCATTGCCAAAAAAGTATGCTTAT |
| | | | TGGTACCAGCAGAAGTCAGGCCAGGCCCCTGTTCTGGTCATCCATGAGGACAGG |
| | | | AAACGACCCTCCGGGATCCCTGAGAGATTCTCTGGCTCCAGCTCAGGGACAATG |
| | | | GCCACCTTGACTATCAGTGGGGCCCAGGTGGAGGATGAAGCTGACTACTACTGT |
| | | | TTCTCAACAGACAGCAGTGGTAATCCTAGGGTGTTCGGCGGAGGGACCAAGCTG |
| | | | ACCGTCCTAGGTCAGCCCAAGGCTGCCCCCTCGGTCACTCTGTTCCCACCCTCCT |
| | | | CTGAGGAGCTTCAAGCCAACAAGGCCACACTGGTGTGTCTCATAAGTGACTTCT |
| | | | ACCCGGGAGCCGTGACAGTGGCCTGGAAGGCAGATAGCAGCCCCGTCAAGGCG |
| | | | GGAGTGGAGACCACCACACCCTCCAAACAAAGCAACAACAAGTACGCGGCCAGC |
| | | | AGCTACCTGAGCCTGACGCCTGAGCAGTGGAAGTCCCACAAAAGCTACAGCTGC |
| | | | CAGGTCACGCATGAAGGGAGCACCGTGGAGAAGACAGTGGCCCCTACAGAATGT |
| | | | TCA |
| 677 | KY05- | Amino acid sequence of KY05 | EVQLVESGGGLVQPGRSLRLSCAASGFTFDDYAMHWVRLGPGRGLEWVSRISWN |
| | V_{H} | heavy chain variable region | SGSTDYADSVKGRFTISRDNAKNSLFLQMNSLRTEDTALWCAKERTPAGITVAGF |
| | | | DYWGQGSLVTVSS |
| 678 | KY05- | Nucleic acid sequence of KY05 | GAAGTGCAACTGGTGGAGTCTGGGGGAGGCTTGGTACAGCCTGGCAGGTCCCT |
| | V_{H} | heavy chain variable region | GAGACTCTCCTGTGCAGCCTCTGGATTCACCTTTGATGATTATGCCATGCACTG |
| | | | GGTCCGGCTAGGTCCAGGGAGGGGCCTGGAGTGGGTCTCACGTATTAGTTGGA |
| | | | ATAGTGGTTCCACAGACTATGCGGACTCTGTGAAGGGCCGATTCACCATCTCCA |
| | | | GAGACAACGCCAAGAACTCCCTCTTTCTGCAAATGAACAGTCTGAGAACTGAGG |
| | | | ACACGGCCTTGTATTACTGTGCAAAAGAAAGAACCCCCGCGGGTATAACAGTGG |
| | | | CTGGTTTTGACTACTGGGGCCAGGGATCCCTGGTCACCGTCTCCTCA |
| 679 | KY05- | Amino acid sequence of KY05 | DIVMTQSPLSLPVTPGEPASISCRSSQSLIHSNGFNYLDWYLQKPGQTPQLLIYLVS |
| | V_{L} | light chain variable region | TRASGVPDRFSGSGSGTDFTLKISRVEAEDVGVFYCMQALQTPCSFGQGTKLEIK |
| 680 | KY05- | Nucleic acid sequence of KY05 | GATATTGTGATGACTCAGTCTCCACTCTCCCTGCCCGTCACCCCTGGAGAGCCG |
| | V_{L} | light chain variable region | GCCTCCATCTCCTGCAGGTCTAGTCAGAGCCTCCTGCATAGTAATGGATTCAACT |
| | | | ATTTGGATTGGTACCTGCAGAAGCCAGGGCAGACTCCACAACTCCTGATCTATT |
| | | | TGGTTTCTACTCGGGCCTCCGGGGTCCCTGACAGGTTCAGTGGCAGTGGATCAG |
| | | | GCACAGATTTTACACTGAAAATCAGCAGAGTGGAGGCTGAGGATGTTGGGGTTT |
| | | | TTTACTGCATGCAAGCTCTACAAACTCCGTGCAGTTTTGGCCAGGGGACCAAGC |
| | | | TGGAGATCAAA |
| 681 | KY06- | Amino acid sequence of KY06 | EVQLVESGGGLVQPGRSLRLSCAASGFTFDAYALHWVRLGPGRGLEWVSRISWNS |
| | V_{H} | heavy chain variable region | GSIDYADSVKGRFTISRDNAKNSLYLQMNSLRTEDTALYYCAKERTPAGITVAGFD |
| | | | FWGQGTLVTVSS |
| 682 | KY06- | Nucleic acid sequence of KY06 | GAAGTGCAACTGGTGGAGTCTGGGGGAGGCTTGGTACAGCCTGGCAGGTCCCT |
| | V_{H} | heavy chain variable region | GAGACTCTCCTGTGCAGCCTCTGGATTCACCTTTGATGCTTATGCCTTGCACTG |
| | | | GGTCCGGCTAGGTCCAGGGAGGGGCCTGGAGTGGGTCTCACGTATTAGTTGGA |
| | | | ATAGTGGTTCTATTGACTATGCGGACTCTGTGAAGGGCCGATTCACCATCTCCA |
| | | | GAGACAACGCCAAGAACTCCCTGTATCTGCAAATGAACAGTCTGAGAACTGAGG |
| | | | ACACGGCCTTGTATTACTGTGCAAAAGAAAGAACCCCCGCGGGTATAACAGTGG |
| | | | CTGGTTTTGACTTCTGGGGCCAGGGGACCCTGGTCACCGTCTCCTCA |
| 683 | KY06- | Amino acid sequence of KY06 | DIVMTQSPLSLPVTPGEPASISCRSSQSLLHSNGFNYLDWYLQKPGQTPQLLIYLVS |
| | V_{L} | light chain variable region | TRASGVPDRFSGSGSGTDFTLKISRVEAEDVGVFYCMQALQTPCSFGQGTKLEIK |
| 684 | KY06- | Nucleic acid sequence of KY06 | GATATTGTGATGACTCAGTCTCCACTCTCCCTGCCCGTCACCCCTGGAGAGCCG |
| | V_{L} | light chain variable region | GCCTCCATCTCCTGCAGGTCTAGTCAGAGCCTCCTGCATAGTAATGGATTCAACT |
| | | | ATTTGGATTGGTACCTGCAGAAGCCAGGACAGACTCCACAACTCCTGATCTATTT |
| | | | GGTTTCTACTCGGGCCTCCGGGGTCCCTGACAGGTTCAGTGGCAGTGGATCAG |
| | | | GCACAGATTTTACACTGAAAATCAGCAGAGTGGAGGCTGAGGATGTTGGGGTTT |
| | | | TTTACTGCATGCAAGCTCTACAGACTCCGTGCAGTTTTGGCCAGGGGACCAAGC |
| | | | TGGAGATCAAA |
| 685 | KY07- | Amino acid sequence of KY07 | EVQLVESGGDLVQPGRSLRLSCAASGFTFDDYAMHWVRLGPGRGLEWVSRISWN |
| | V_{H} | heavy chain variable region | SGSIDYADSVKGRFTISRDNAKNSLYLQMNSLRTEDTALYYCAKERTPAGITVAGF |
| | | | DYWGQGTLVTVSS |
| 686 | KY07- | Nucleic acid sequence of KY07 | GAAGTGCAGCTGGTGGAGTCTGGGGGAGACTTGGTACAGCCTGGCAGGTCCCT |
| | V_{H} | heavy chain variable region | GAGACTCTCCTGTGCAGCCTCTGGATTCACCTTTGATGATTATGCCATGCACTG |
| | | | GGTCCGGCTAGGTCCAGGGAGGGGCCTGGAGTGGGTCTCACGTATTAGTTGGA |
| | | | ATAGTGGTTCTATAGACTATGCGGACTCTGTGAAGGGCCGATTCACCATCTCCA |
| | | | GAGACAACGCCAAGAACTCCCTGTATCTGCAAATGAACAGTCTGAGAACTGAGG |
| | | | ACACGGCCTTGTATTACTGTGCAAAAGAAAGAACCCCCGCGGGTATAACAGTGG |
| | | | CTGGTTTTGACTACTGGGGCCAGGGAACCCTGGTCACCGTCTCCTCA |
| 687 | KY07- | Amino acid sequence of KY07 | DIVMTQSPLSLPVTPGEPASISCRSSQSLIHSNGFNYLDWYLQKPGQTPQLLIYLVS |
| | V_{L} | light chain variable region | TRASGVPDRFSGSGSGTDFTLKISRVEAEDVGVFYCMQALQTPCSFGQGTKLEIK |
| 688 | KY07- | Nucleic acid sequence of KY07 | GATATTGTGATGACTCAGTCTCCACTCTCCCTGCCCGTCACCCCTGGAGAGCCG |
| | V_{L} | light chain variable region | GCCTCCATCTCCTGCAGGTCTAGTCAGAGCCTCCTGCATAGTAATGGATTCAACT |
| | | | ATTTGGATTGGTACCTGCAGAAGCCAGGGCAGACTCCACAACTCCTGATCTATT |
| | | | TGGTTTCTACTCGGGCCTCCGGGGTCCCTGACAGGTTCAGTGGCAGTGGATCAG |
| | | | GCACAGATTTTACACTGAAAATCAGCAGAGTGGAGGCTGAGGATGTTGGGGTTT |
| | | | TTTACTGCATGCAAGCTCTACAAACTCCGTGCAGTTTTGGCCAGGGGACCAAGC |
| | | | TGGAGATCAAA |
| 689 | KY08- | Amino acid sequence of KY08 | EVQLVESGGGLVQPGRSLRLSCAASGFTFDDYAMHWVRLGPGRGLEWVSRISWN |
| | V_{H} | heavy chain variable region | SGSIDYADSVKGRFTISRDNAKNSLYLQMNSLRTEDTALYYCAKERTPAGITVAGF |
| | | | DYWGQGTLVTVSS |
| 690 | KY08- | Nucleic acid sequence of KY08 | GAAGTGCAGCTGGTGGAGTCTGGGGGAGGCTTGGTACAGCCTGGCAGGTCCCT |
| | V_{H} | heavy chain variable region | GAGACTCTCCTGTGCAGCCTCTGGATTCACGTTTGATGATTATGCCATGCACTG |
| | | | GGTCCGGCTAGGTCCAGGGAGGGGCCTGGAGTGGGTCTCACGTATTAGTTGGA |
| | | | ATAGTGGTTCTATAGACTATGCGGACTCTGTGAAGGGCCGATTCACCATCTCCA |
| | | | GAGACAACGCCAAGAACTCCCTGTATCTGCAAATGAACAGTCTGAGAACTGAGG |
| | | | ACACGGCCCTGTATTACTGTGCAAAAGAAAGAACCCCCGCGGGTATAACAGTGG |
| | | | CTGGTTTTGACTACTGGGGCCAGGGAACCUGGTCACCGTCTCCTCA |
| 691 | KY08- | Amino acid sequence of KY08 | DIVMTQSPLSLPVTPGEPASISCRSSQSLLHSNGFNYLDWYLQKPGQTPQLLIYLVS |
| | V_{L} | light chain variable region | TRASGVPDRFSGSGSGTDFTLKISRVEAEDVGVFYCMQALQTPCSFGQGTKLEIK |
| 692 | KY08- | Nucleic acid sequence of KY08 | GATATTGTGATGACTCAGTCTCCACTCTCCCTGCCCGTCACCCCTGGAGAGCCG |
| | V_{L} | light chain variable region | GCCTCCATCTCCTGCAGGTCTAGTCAGAGCCTCCTGCATAGTAATGGATTCAACT |
| | | | ATTTGGATTGGTACCTGCAGAAGCCAGGGCAGACTCCACAACTCCTGATCTATT |
| | | | TGGTTTCTACTCGGGCCTCCGGGGTCCCTGACAGGTTCAGTGGCAGTGGATCAG |
| | | | GCACAGATTTTACACTGAAAATCAGCAGAGTGGAGGCTGAGGATGTTGGGGTTT |
| | | | TTTACTGCATGCAAGCTCTACAAACTCCGTGCAGTTTTGGCCAGGGGACCAAGC |
| | | | TGGAGATCAAA |
| 693 | KY09- | Amino acid sequence of KY09 | EVQLVESGGGLVKPGGSLRLSCAASGFTFSNAWMSWVRQAPGKGLEWVGRIKSKT |
| | V_{H} | heavy chain variable region | NGGTTDYAAPVKGRFTISRDDSKNTLYLQMNSLKTEDTAVYCCTIDPLYDILTGPW |
| | | | GQGTLVTVSS |
| 694 | KY09- | Nucleic acid sequence of KY09 | GAGGTGCAGCTGGTGGAGTCTGGGGGAGGCTTGGTAAAGCCTGGGGGGTCCCT |
| | V_{H} | heavy chain variable region | TAGACTCTCCTGTGCAGCCTCTGGATTCACTTTTAGTAACGCCTGGATGAGCTG |
| | | | GGTCCGCCAGGCTCCAGGGAAGGGACTGGAGTGGGTTGGCCGTATTAAAAGCA |
| | | | AAACTAATGGTGGGACAACAGACTACGCTGCACCCGTGAAAGGCAGATTCACCA |
| | | | TCTCAAGAGATGATTCAAAAAACACGCTGTATCTGCAAATGAACAGCCTGAAAAC |
| | | | CGAGGACACAGCCGTTTATTGTTGTACCATAGACCCCCTCTATGATATTTTGACT |
| | | | GGTCCCTGGGGCCAGGGAACCCTGGTCACCGTCTCCTCA |
| 695 | KY09- | Amino acid sequence of KY09 | PYELTQAPSVSVSPGQAASITCSGDKLGDKYACWYQQKPGQSPVLVIYQDSKRPSG |
| | V_{L} | light chain variable region | IPERFSGSNSGNTATLTISGTQAMDEADYYCQAWDSSTVVFGGGTKLTVL |
| 696 | KY09- | Nucleic acid sequence of KY09 | CCCTATGAACTGACTCAGGCACCCTCAGTGTCCGTGTCCCCAGGACAGGCAGCC |
| | V_{L} | light chain variable region | AGCATCACCTGCTCTGGAGATAAATTGGGGGATAAATATGCTTGCTGGTATCAG |
| | | | CAGAAGCCAGGCCAGTCCCCTGTGCTGGTCATCTATCAAGATAGCAAGCGGCCC |
| | | | TCAGGGATCCCTGAGCGATTCTCTGGCTCCAATTCTGGGAACACAGCCACTCTG |
| | | | ACCATCAGCGGGACCCAGGCTATGGATGAGGCTGACTATTACTGTCAGGCGTGG |
| | | | GACAGCAGCACTGTGGTTTTCGGCGGAGGGACCAAGCTGACCGTCCTA |
| 697 | KY10- | Amino acid sequence of KY10 | EVQLVESGGGLVKPGGSLRLSCAASGFTFSYAWMSWVRQAPGKGLEWVGRIKSKT |
| | V_{H} | heavy chain variable region | NGGTTDYAAPVKGRFTISRDDSKDTLYLLMNSLKTEDTAVYYCTIDPLYDLLTGPW |
| | | | GQGTLVTVSS |
| 698 | KY10- | Nucleic acid sequence of KY10 | GAGGTGCAGCTGGTGGAGTCTGGGGGAGGCTTGGTAAAGCCTGGGGGGTCCCT |
| | V_{H} | heavy chain variable region | TAGACTCTCCTGTGCAGCCTCTGGATTCACTTTTAGTTACGCCTGGATGAGCTG |
| | | | GGTCCGCCAGGCTCCAGGGAAGGGGCTGGAGTGGGTTGGCCGTATTAAAAGCA |
| | | | AAACTAATGGTGGGACAACAGACTACGCTGCACCCGTGAAAGGCAGATTCACCA |
| | | | TCTCAAGAGATGATTCAAAAGACACGCTGTATCTGCTAATGAACAGCCTGAAAAC |
| | | | CGAGGACACAGCCGTGTATTACTGTACCATAGACCCCCTCTACGATCTTTTGACT |
| | | | GGTCCCTGGGGCCAGGGAACCCTGGTCACCGTCTCCTCA |
| 699 | KY10- | Amino acid sequence of KY10 | SYELTQPPSVSVSPGQTASITCSGDKLGDKYGCWYQQKPGQSPILVIYQDSKRPSG |
| | V_{L} | light chain variable region | IPERFSGSNSGNTATLTISGTQAMDEADYYCQAWDSSTVVFGGGTKLTVL |
| 700 | KY10- | Nucleic acid sequence of KY10 | TCCTATGAGCTGACTCAGCCACCCTCAGTGTCCGTGTCCCCAGGACAGACAGCC |
| | V_{L} | light chain variable region | AGCATCACCTGCTCTGGAGATAAATTGGGGGATAAATATGGTTGCTGGTATCAG |
| | | | CAGAAGCCAGGCCAGTCCCCTATACTGGTCATCTATCAAGATAGCAAGCGGCCC |
| | | | TCGGGGATCCCTGAGCGATTCTCTGGCTCCAATTCTGGGAACACAGCCACTCTG |
| | | | ACCATCAGCGGGACCCAGGCTATGGATGAGGCTGACTATTACTGTCAGGCGTGG |
| | | | GACAGCAGCACTGTGGTATTCGGCGGAGGGACCAAGCTGACCGTCCTA |
| 701 | KY11- | Amino acid sequence of KY11 | EVQLVESGGGLVKPGGSLRLSCAASGFTFSNAWMSWVRQAPGKGLEWVGRIKSKT |
| | V_{H} | heavy chain variable region | NGGTTDYAAPVKGRFTISRDDSKNTLYLQMNSLKTEDTAVYYCTIDPLYDILTGPW |
| | | | GQGTLVTVSS |
| 702 | KY11- | Nucleic acid sequence of KY11 | GAGGTGCAGCTGGTGGAGTCTGGGGGAGGCTTGGTAAAGCCTGGGGGGTCCCT |
| | V_{H} | heavy chain variable region | TAGACTCTCCTGTGCAGCCTCTGGATTCACTTTTAGTAACGCCTGGATGAGCTG |
| | | | GGTCCGCCAGGCTCCAGGGAAGGGGCTGGAGTGGGTTGGCCGTATTAAAAGCA |
| | | | AAACTAATGGTGGGACAACAGACTACGCTGCACCCGTGAAAGGCAGATTCACCA |
| | | | TCTCAAGAGATGATTCAAAAAACACGCTGTATCTGCAAATGAACAGCCTGAAAAC |
| | | | CGAGGACACAGCCGTGTATTACTGTACCATAGACCCCCTCTACGATATTTTGACT |
| | | | GGTCCCTGGGGCCAGGGAACCCTGGTCACCGTCTCCTCA |
| 703 | KY11- | Amino acid sequence of KY11 | SYELTQPPSVSVSPGQTASITCSGDKLGDKYACWYQQKPGQSPVLVIYQDSKRPSG |
| | V_{L} | light chain variable region | IPERFSGSNSGNTATLTISGTQAMDEADYYCQAWDSSTVVFGGGTKLTVL |
| 704 | KY11- | Nucleic acid sequence of KY11 | TCCTATGAGCTGACTCAGCCACCCTCAGTGTCCGTGTCCCCAGGACAGACAGCC |
| | V_{L} | light chain variable region | AGCATCACCTGCTCTGGAGATAAATTGGGGGATAAATATGCTTGCTGGTATCAG |
| | | | CAGAAGCCAGGCCAGTCCCCTGTGCTGGTCATCTATCAAGATAGCAAGCGGCCC |
| | | | TCAGGGATCCCTGAGCGATTCTCTGGCTCCAAtTCTGGGAACACAGCCACTCTGA |
| | | | CCATCAGCGGGACCCAGGCTATGGATGAGGCTGACTATTACTGTCAGGCGTGGG |
| | | | ACAGCAGCACTGTGGTATTCGGCGGAGGGACCAAGCTGACCGTCCTA |
| 705 | KY12- | Amino acid sequence of KY12 | EVQLVESGGGLVKPGGSLRLSCAASGFTFSYAWMSWVRQAPGKGLEWVGRIKSKT |
| | V_{H} | heavy chain variable region | NGGTTDVAAPVKGRFTISRDDSKNTLYLQMNSLKTEDTAVYYCTTDPLYDILTGLW |
| | | | GQGTLVTVSS |
| 706 | KY12- | Nucleic acid sequence of KY12 | GAGGTGCAGCTGGTGGAGTCTGGGGGAGGCTTGGTAAAGCCTGGGGGGTCCCT |
| | V_{H} | heavy chain variable region | TAGACTCTCCTGTGCAGCCTCTGGATTCACTTTCAGTTACGCCTGGATGAGCTG |
| | | | GGTCCGCCAGGCTCCAGGGAAGGGGCTGGAGTGGGTTGGCCGTATCAAAAGCA |
| | | | AAACTAATGGTGGGACAACAGACTACGCTGCACCCGTGAAAGGCAGATTCACCA |
| | | | TCTCAAGAGATGATTCAAAAAACACGCTGTATCTGCAAATGAACAGCCTGAAAAC |
| | | | CGAGGACACAGCCGTGTATTACTGTACCACAGACCCCCTCTACGATATTTTGACT |
| | | | GGTCTATGGGGCCAGGGAACCCTGGTCACCGTCTCCTCA |
| 707 | KY12- | Amino acid sequence of KY12 | SYELTQPPSMSVSPGQTASITCSGDKLGDKYACWYQQKPGQSPVLVIYQDSKRPS |
| | V_{L} | light chain variable region | GIPERFSGSNSGNTATLTISGTQAMDESDYYCQAWDSSTVVFGGGTKLTVL |
| 708 | KY12- | Nucleic acid sequence of KY12 | TCCTATGAACTGACTCAGCCACCCTCAATGTCCGTGTCCCCAGGACAGACAGCCA |
| | V_{L} | light chain variable region | GCATCACCTGCTCTGGAGATAAATTGGGGGATAAATATGCTTGCTGGTATCAGC |
| | | | AGAAGCCAGGCCAGTCCCCTGTGCTGGTCATCTATCAAGATAGCAAGCGGCCCT |
| | | | CAGGGATCCCTGAGCGATTCTCTGGCTCCAACTCTGGGAACACAGCCACTCTGA |
| | | | CCATCAGCGGGACCCAGGCTATGGATGAGTCTGACTATTACTGTCAGGCGTGGG |
| | | | ACAGCAGCACTGTGGTATTCGGCGGAGGGACCAAACTGACCGTCCTA |
| 709 | KY13- | Amino acid sequence of KY13 | QVPLVESGGGLVRPGGSLRLSCAASGFTFSDYYMSWIRQAPGKGLEWVSYISSSGS |
| | V_{H} | heavy chain variable region | TVYSADSVKGRFTVSRDNAKSSELHMNSLRAEDTAIYYCARDRGFGESYCFDYW |
| | | | GQGTLVTVSS |
| 710 | KY13- | Nucleic acid sequence of KY13 | CAGGTGCCGCTGGTGGAGTCTGGGGGAGGCTTGGTCAGGCCTGGAGGGTCCCT |
| | V_{H} | heavy chain variable region | GAGACTCTCCTGTGCAGCCTCTGGATTCACCTTCAGTGACTACTACATGAGCTG |
| | | | GATCCGCCAGGCTCCAGGGAAGGGGCTGGAGTGGGTTTCATACATTAGTAGTA |
| | | | GTGGTAGTACCGTGTATTCCGCAGACTCTGTGAAGGGCCGATTCACCGTCTCCA |
| | | | GGGACAACGCCAAGAGCTCACTGCTTCTGCACATGAACAGCCTGAGAGCCGAGG |
| | | | ACACGGCCATATATTACTGTGCGAGAGATAGAGGGTTCGGGGAGTCCTATTGCT |
| | | | TTGACTACTGGGGCCAGGGAACCCTGGTCACCGTCTCCTCA |
| 711 | KY13- | Amino acid sequence of KY13 | DIQMTQSPSSLSASVGDRVTITCRASQNIKSYLTWYQQKPGKAPKLLIYTASSLQS |
| | V_{L} | light chain variable region | GVPSRFSGSGSGTDFILTISSLQPEDFATYYCQQSYSIPCSFGQGTKLEIK |
| 712 | KY13- | Nucleic acid sequence of KY13 | GACATCCAGATGACCCAGTCTCCATCCTCCCTGTCTGCATCTGTAGGAGACAGA |
| | V_{L} | light chain variable region | GTCACCATCACTTGCCGGGCAAGTCAGAACATTAAGAGTTATTTAACTTGGTATC |
| | | | AGCAGAAACCAGGGAAAGCCCCTAAGCTCCTGATCTATACTGCATCCAGTTTACA |
| | | | AAGTGGGGTCCCATCAAGGTTCAGTGGCAGTGGATCTGGGACAGATTTCACTCT |
| | | | CACCATCAGCAGTCTGCAACCTGAAGATTTTGCAACTTATTACTGTCAACAGAGT |
| | | | TACAGTATCCCGTGCAGTTTTGGCCAGGGGACCAAGCTGGAGATCAAA |
| 713 | KY14- | Amino acid sequence of KY14 | EVQLEESGGGLVKPGGSLRLSCAASGFTFSNAWMSWVRQAPGKGLEWVGRIKSKT |
| | V_{H} | heavy chain variable region | NGGTRDYAAPVKGRFTISRDDSKNTLYLQMNSLKTEDTAVYYCTIDPPLYDLLTGH |
| | | | WGQGTLVTVSS |
| 714 | KY14- | Nucleic acid sequence of KY14 | GAGGTGCAGCTGGAGGAGTCTGGGGGAGGCTTGGTAAAGCCGGGGGGGTCCCT |
| | V_{H} | heavy chain variable region | TAGACTCTCCTGTGCAGCCTCTGGATTCACTTTCAGTAACGCCTGGATGAGCTG |
| | | | GGTCCGCCAGGCTCCAGGGAAGGGGCTGGAGTGGGTTGGCCGTATTAAAAGCA |
| | | | AAACTAATGGTGGGACAAGAGACTATGCTGCACCCGTGAAAGGCAGATTCACCA |
| | | | TCTCAAGAGATGATTCAAAAAACACGCTGTATCTGCAAATGAACAGCCTGAAAAC |
| | | | CGAGGACACAGCCGTGTATTACTGTACCACAGATCCCCCCCTTTACGATCTTTTG |
| | | | ACTGGCCATTGGGGCCAGGGAACCCTGGTCACCGTCTCCTCA |
| 715 | KY14- | Amino acid sequence of KY14 | SYELTQPPSVSVSPGQTASITCSGDKLGDKYACWYQQKPGQSPVLVIYQDSKRPSG |
| | V_{L} | light chain variable region | IPERFSGSNSGNTATLTISGTQAMDEADYYCQAWDSNTAVFGAGTKVTVL |
| 716 | KY14- | Nucleic acid sequence of KY14 | TCCTATGAACTGACTCAGCCACCCTCAGTGTCCGTGTCCCCAGGACAGACAGCC |
| | V_{L} | light chain variable region | AGCATCACCTGCTCTGGAGATAAATTGGGGGATAAATATGCTTGCTGGTATCAG |
| | | | CAGAAGCCAGGCCAGTCCCCTGTGCTGGTCATCTATCAAGATAGTAAGCGGCCC |
| | | | TCAGGGATCCCTGAGCGATTCTCTGGCTCCAACTCTGGGAACACAGCCACTCTG |
| | | | ACCATCAGCGGGACCCAGGCTATGGATGAGGCTGACTATTACTGTCAGGCCTGG |
| | | | GACAGCAACACTGCTGTCTTCGGAGCTGGGACCAAGGTCACCGTCCTA |
| 717 | KY15- | Amino acid sequence of KY15 | EVQLVESGGGLVKPGGSLRLSCAASGFTFSNVWMSWVRQAPGKGLEWVGRIKSKS |
| | V_{H} | heavy chain variable region | NGGTTDNSAPVKGRFTISRDDSKNTLYLQMNSLKTEDTAVYYCTTDPPLYDILTGH |
| | | | WGQGTLVTVSS |
| 718 | KY15- | Nucleic acid sequence of KY15 | GAGGTGCAGCTGGTGGAGTCTGGGGGAGGCTTGGTAAAGCCTGGGGGGTCCCT |
| | V_{H} | heavy chain variable region | TAGACTCTCCTGTGCAGCCTCTGGATTCACTTTCAGTAACGTCTGGATGAGCTG |
| | | | GGTCCGCCAGGCTCCAGGGAAGGGGCTGGAGTGGGTTGGCCGTATTAAAAGTA |
| | | | AAAGTAATGGTGGGACAACAGACAACTCTGCACCCGTGAAAGGCAGATTCACCA |
| | | | TTTCAAGAGATGATTCAAAAAACACGCTGTATCTGCAAATGAACAGCCTGAAAAC |
| | | | CGAGGACACAGCCGTGTATTACTGTACCACAGATCCCCCCCTTTACGATATTTTG |
| | | | ACTGGCCATTGGGGCCAGGGAACCCTGGTCATTGTCTCCTCA |
| 719 | KY15- | Amino acid sequence of KY15 | SYELTQPPSVSVSPGQTASITCSGDKLGDKYACWYQQKPGQSPVLVIYQDNKRPS |
| | V_{L} | light chain variable region | GIPERFSGSNSGNTATLTISGTQAMDEADYYCQAWDSSTAVFGTGTKVIVL |
| 720 | KY15- | Nucleic acid sequence of KY15 | TCCTATGAATTGACTCAGCCACCCTCAGTGTCCGTGTCCCCAGGACAGACAGCC |
| | V_{L} | light chain variable region | AGCATCACCTGCTCTGGAGATAAATTGGGGGATAAATATGCTTGCTGGTATCAG |
| | | | CAGAAGCCAGGCCAGTCCCCTGTGCTGGTCATCTATCAGGATAACAAGCGGCCC |
| | | | TCAGGGATCCCTGAGCGATTCTCTGGCTCCAACTCTGGGAACACAGCCACTCTG |
| | | | ACCATCAGCGGGACCCAGGCTATGGATGAGGCTGACTATTACTGTCAGGCGTGG |
| | | | GACAGCAGCACTGCTGTCTTCGGAACTGGGACCAAGGTCACCGTCCTA |
| 721 | KY16- | Amino acid sequence of KY16 | EVQLVESGGGLVQPGRSLRLSCAASGFTFDDYAMHVINRQTPGKGLEWVSGISWN |
| | V_{H} | heavy chain variable region | SITIGYADSVKGRFTLSRDNAKNSLYLQMNSLIAEDTALYYCAKDGGSLRYYGMDV |
| | | | WGQGTTVTVSS |
| 722 | KY16- | Nucleic acid sequence of KY16 | GAAGTGCAGTTGGTGGAGTCTGGGGGAGGCTTGGTACAGCCTGGCAGGTCCCT |
| | V_{H} | heavy chain variable region | GAGACTCTCCTGTGCAGCCTCTGGATTCACCTTTGATGATTATGCCATGCACTG |
| | | | GGTCCGGCAAACTCCAGGGAAGGGCCTGGAGTGGGTCTCAGGTATTAGTTGGA |
| | | | ATAGTATCACCATAGGCTATGCGGACTCTGTGAAGGGCCGATTCACCCTGTCCA |
| | | | GAGACAACGCCAAGAACTCCCTGTATCTGCAAATGAACAGTCTGATAGCTGAGG |
| | | | ACACGGCCTTGTATTACTGTGCAAAAGATGGTGGTTCACTTCGCTACTACGGTA |
| | | | TGGACGTCTGGGGCCAAGGGACCACGGTCACCGTCTCCTCA |
| 723 | KY16- | Amino acid sequence of KY16 | DIVMTQSPLSLPVTPGEPASISCRSSQSLLHSNGYNYLNWYLQKAGQSPQLLIYLGS |
| | V_{L} | light chain variable region | NRASGVPDRFSGSGSGTDFTLKISRVEAEDVGVFYCMQALQTPLTFGGGTKVEIK |
| 724 | KY16- | Nucleic acid sequence of KY16 | GATATTGTGATGACTCAGTCTCCACTCTCCCTGCCCGTCACCCCTGGAGAGCCG |
| | V_{L} | light chain variable region | GCCTCCATCTCCTGCAGGTCTAGTCAGAGCCTCCTGCATAGTAATGGATACAACT |
| | | | ATTTGAATTGGTACCTGCAGAAGGCAGGGCAGTCTCCACAGCTCCTGATCTATT |
| | | | TGGGTTCTAATCGGGCCTCCGGGGTCCCTGACAGGTTCAGTGGCAGTGGATCA |
| | | | GGCACAGATTTTACACTGAAAATCAGCAGAGTGGAGGCTGAGGATGTTGGGGTT |
| | | | TTTTACTGCATGCAAGCTCTACAAACTCCGCTCACTTTCGGCGGAGGGACTAAG |
| | | | GTGGAGATCAAA |
| 725 | KY17- | Amino acid sequence of KY17 | EVQLVESGGGLVQPGRSLRLSCTASGFSFDDYAMFMNRQVPGKGLEWVSGISWN |
| | V_{H} | heavy chain variable region | SITIGYADSVKGRFTISRDNAKNSLYLQMNSLRAEDTALYFCAKDGGNRIMGMDV |
| | | | WGQGTTVTVSS |
| 726 | KY17- | Nucleic acid sequence of KY17 | GAAGTGCAGCTGGTGGAGTCTGGGGGAGGCTTGGTCCAGCCTGGCAGGTCCCT |
| | V_{H} | heavy chain variable region | GAGACTCTCCTGTACAGCCTCTGGATTCTCCTTTGATGATTATGCCATGCACTGG |
| | | | GTCCGGCAAGTTCCAGGGAAGGGCCTGGAGTGGGTCTCAGGTATTAGTTGGAA |
| | | | TAGTATTACCATTGGCTATGCGGACTCTGTGAAGGGCCGATTCACCATCTCCAG |
| | | | AGACAACGCCAAGAACTCCCTCTATCTGCAAATGAACAGTCTGAGAGCTGAGGA |
| | | | CACGGCCTTGTATTTCTGTGCAAAAGATGGGGGGAATAGGAAATACTATGGTAT |
| | | | GGACGTCTGGGGCCAAGGGACCACGGTCACCGTCTCCTCA |
| 727 | KY17- | Amino acid sequence of KY17 | DIVMTQSPLSLPVTPGEPASISCRSSQSLLHSNGYNYLDWYLQKPGQSPHLLIYLGS |
| | V_{L} | light chain variable region | NRASGVPDRFSGSGSGTDFTLKISRVEADDVGVYFCLQALQTPCSFGQGTKLEIK |
| 728 | KY17- | Nucleic acid sequence of KY17 | GATATTGTGATGACTCAGTCTCCACTCTCCCTGCCCGTCACCCCTGGAGAGCCG |
| | V_{L} | light chain variable region | GCCTCCATCTCCTGCAGGTCTAGTCAGAGCCTCCTGCATAGTAATGGATACAACT |
| | | | ATTTGGATTGGTACCTGCAGAAGCCAGGGCAGTCTCCACACCTCCTGATCTATT |
| | | | TGGGTTCTAATCGGGCCTCCGGGGTCCCTGACAGGTTCAGTGGCAGTGGATCA |
| | | | GGCACAGATTTTACACTGAAAATCAGCAGAGTGGAGGCTGACGATGTTGGGGTT |
| | | | TATTTCTGCTTGCAAGCTCTACAAACTCCGTGCAGTTTTGGCCAGGGGACCAAG |
| | | | CTGGAGATCAAA |
| 729 | KY18- | Amino acid sequence of KY18 | EVQLVESGGGLVQPGRSLRLSCAASGFTFDDYAMHWVRQAPGKGLEWVSGISWN |
| | V_{H} | heavy chain variable region | SITIGYADSVKGRFTISRDNAKNSLYLQMNSLRAEDTALYYCTKDGGNRRYYGVDV |
| | | | WGQGTTVTVSS |
| 730 | KY18- | Nucleic acid sequence of KY18 | GAAGTGCAGCTGGTGGAGTCTGGGGGAGGCTTGGTACAGCCTGGCAGGTCCCT |
| | V_{H} | heavy chain variable region | GAGACTCTCCTGTGCAGCCTCTGGATTCACCTTTGATGATTATGCCATGCACTG |
| | | | GGTCCGGCAAGCTCCAGGGAAGGGCCTGGAGTGGGTCTCAGGTATTAGTTGGA |
| | | | ATAGTATTACCATAGGCTATGCGGACTCTGTGAAGGGCCGATTCACCATCTCCA |
| | | | GAGACAACGCCAAGAACTCCCTCTATCTGCAAATGAACAGTCTGAGAGCTGAGG |
| | | | ACACGGCCTTGTATTACTGTACAAAAGATGGGGGGAATAGGAGATACTACGGTG |
| | | | TGGACGTCTGGGGCCAAGGGACCACGGTCACAGTCTCCTCA |
| 731 | KY18- | Amino acid sequence of KY18 | DIVMTQSPLSLPVTPGEPASISCRSSQSLLHSNGYNYLDWYLQKPGQSPQLLIYLGS |
| | V_{L} | light chain variable region | NRASGVPDRFSGSGSGTDFTLKISRVEAEDVGWYCMQALQTPCSFGQGTKLEIK |
| 732 | KY18- | Nucleic acid sequence of KY18 | GATATTGTGATGACTCAGTCTCCACTCTCCCTGCCCGTCACCCCTGGAGAGCCG |
| | V_{L} | light chain variable region | GCCTCCATCTCCTGCAGGTCTAGTCAGAGCCTCCTGCATAGTAATGGATACAACT |
| | | | ATTTGGATTGGTACCTGCAGAAGCCAGGGCAGTCTCCACAGCTCCTGATCTATT |
| | | | TGGGTTCTAATCGGGCCTCCGGGGTCCCTGACAGGTTCAGTGGCAGTGGATCA |
| | | | GGCACAGATTTTACACTGAAAATCAGCAGAGTGGAGGCTGAGGATGTTGGGGTT |
| | | | TATTACTGCATGCAAGCTCTACAAACTCCGTGCAGTTTTGGCCAGGGGACCAAG |
| | | | CTGGAGATCAAA |
| 733 | KY19- | Amino acid sequence of KY19 | EVQLVESGGGLVQPGRSLRLSCAASGFTFDDYAMHWVRQAPGKGLEWVSGISWN |
| | V_{H} | heavy chain variable region | SINIGYADSVKGRFTISRDNAKNSLYLQMNSLRAEDTALYYCAKDIPVKSYNGLDV |
| | | | WGQGTTVTVSS |
| 734 | KY19- | Nucleic acid sequence of KY19 | GAAGTGCAGCTGGTGGAGTCTGGGGGAGGCTTGGTACAGCCTGGCAGGTCCCT |
| | V_{H} | heavy chain variable region | GAGACTCTCCTGTGCAGCCTCTGGATTCACCTTTGACGATTATGCCATGCACTG |
| | | | GGTCCGGCAAGCTCCAGGGAAGGGCCTGGAGTGGGTCTCAGGTATTAGCTGGA |
| | | | ATAGTATTAACATAGGCTATGCGGACTCTGTGAAGGGCCGATTCACCATCTCCA |
| | | | GAGACAACGCCAAGAACTCCCTGTATCTGCAAATGAACAGTCTGAGAGCTGAGG |
| | | | ACACGGCCTTGTATTACTGTGCAAAAGACATCCCGGTGAAGTCCTACAACGGTT |
| | | | TGGACGTCTGGGGCCAAGGGACCACGGTCACCGTCTCCTCA |
| 735 | KY19- | Amino acid sequence of KY19 | DIVMTQSPLSLPVTPGEPASISCRSSQSLIHSNGYNYLDWYLQKPGQSPQLLIYLGS |
| | V_{L} | light chain variable region | NRASGVPDRFSGSGSGTDFTLKISRVEAEDVGVYYCMQALQTPLTFGGGTKVEIK |
| 736 | KY19- | Nucleic acid sequence of KY19 | GATATTGTGATGACTCAGTCTCCACTCTCCCTGCCCGTCACCCCTGGAGAGCCG |
| | V_{L} | light chain variable region | GCCTCCATCTCCTGCAGGTCTAGTCAGAGCCTCCTGCATAGTAATGGATACAACT |
| | | | ATTTGGATTGGTACCTGCAGAAGCCAGGGCAGTCTCCACAGCTCCTGATCTATT |
| | | | TGGGTTCTAATCGGGCCTCCGGGGTCCCTGACAGGTTCAGTGGCAGTGGATCA |
| | | | GGCACAGATTTTACACTGAAAATCAGCAGAGTGGAGGCTGAGGATGTTGGGGTT |
| | | | TATTACTGCATGCAAGCTCTACAAACTCCGCTCACTTTCGGCGGAGGGACCAAG |
| | | | GTGGAGATCAAA |
| 737 | KY20- | Amino acid sequence of KY20 | EVQLVESGGGLVQPGGSLRLSCAASGFTFDDYGMYWVRQVPGKGLEWVSGISWN |
| | V_{H} | heavy chain variable region | SISIGYADSVKGRFTISRDNAKNSLYLDMNTLRAEDTAMYYCAKDGGLKYYYGMDV |
| | | | WGQGTTVTVSS |
| 738 | KY20- | Nucleic acid sequence of KY20 | GAAGTGCAGTTGGTGGAGTCTGGGGGAGGCTTGGTACAGCCTGGCGGGTCCCT |
| | V_{H} | heavy chain variable region | GAGACTCTCCTGTGCAGCCTCTGGATTCACCTTTGACGATTATGGCATGTACTG |
| | | | GGTCCGGCAAGTTCCAGGGAAGGGCCTGGAGTGGGTCTCAGGAATTAGTTGGA |
| | | | ATAGTATTAGTATAGGCTATGCGGACTCTGTGAAGGGCCGATTCACCATCTCCA |
| | | | GAGACAACGCCAAGAATTCCCTGTATCTGGACATGAACACACTGAGAGCTGAGG |
| | | | ACACGGCCATGTATTACTGTGCAAAAGATGGTGGCTTGAAATACTACTACGGTA |
| | | | TGGACGTCTGGGGCCAAGGGACCACGGTCACCGTCTCCTCA |
| 739 | KY20- | Amino acid sequence of KY20 | DIVMTQSPLSLPVTPGEPASISCRSSQSLLHSNGYIYLAWYLHKPGQSPHLLIYLGS |
| | V_{L} | light chain variable region | NRASGVPDRFSGSGSSTDFTLKISRVESEDVGIYYCMQALQTPLIFGGGTINEIK |
| 740 | KY20- | Nucleic acid sequence of KY20 | GATATTGTGATGACTCAGTCTCCACTCTCCCTGCCCGTCACCCCTGGAGAGCCG |
| | V_{L} | light chain variable region | GCCTCCATCTCCTGCAGGTCTAGTCAGAGCCTCCTGCATAGTAATGGATACATCT |
| | | | ATCTGGCTTGGTACCTGCATAAGCCAGGACAGTCTCCACATCTCCTGATCTATTT |
| | | | GGGTTCTAATCGGGCCTCCGGGGTCCCTGACAGGTTCAGTGGCAGTGGATCAA |
| | | | GCACAGATTTTACACTGAAAATCAGCAGAGTGGAGTCTGAGGATGTTGGGATTT |
| | | | ATTACTGCATGCAAGCTCTACAAACTCCGCTCACTTTCGGCGGAGGGACCAAGG |
| | | | TGGAGATCAAA |
| 741 | KY21- | Amino acid sequence of KY21 | QVQLVESGGGLVKPGGSLRLSCAASGFIFSDYYMSWIRQAPGKGLEWISYSSSSGP |
| | V_{H} | heavy chain variable region | TIYFADSVKGRFTISRDNAKKSLYLQMNSLRDEDTAVYYCAREGITMGRWGMDVW |
| | | | GQGTMVTVSS |
| 742 | KY21- | Nucleic acid sequence of KY21 | CAGGTGCAGTTGGTGGAGTCTGGGGGAGGCTTGGTCAAGCCTGGAGGGTCCCT |
| | V_{H} | heavy chain variable region | GAGACTCTCCTGTGCAGCCTCTGGATTCATCTTCAGTGACTACTACATGAGTTG |
| | | | GATCCGCCAGGCTCCAGGGAAGGGGCTGGAGTGGATTTCATATAGTAGTAGTA |
| | | | GTGGTCCTACCATATACTTCGCAGACTCTGTGAAGGGCCGATTCACCATCTCCA |
| | | | GGGACAATGCCAAGAAGTCATTGTATCTGCAAATGAACAGCCTGAGAGACGAGG |
| | | | ACACGGCCGTATATTATTGTGCGAGAGAGGGTATCACTATGGGCCGGTGGGGT |
| | | | ATGGACGTCTGGGGCCAAGGGACCATGGTCACCGTCTCATCA |
| 743 | KY21- | Amino acid sequence of KY21 | DMQMTQSPSTLSASVGDRVTITCRASQSISNWLAWYQQKPGKAPKLLIYKASNLE |
| | V_{L} | light chain variable region | SGVSSRFSGSGSGTEFTLTISSLQPDDVATYHCQQYNSYTFGGGTKVEIK |
| 744 | KY21- | Nucleic acid sequence of KY21 | GACATGCAGATGACCCAGTCTCCTTCCACCCTGTCTGCATCTGTAGGAGACAGA |
| | V_{L} | light chain variable region | GTCACCATCACTTGCCGGGCCAGTCAGAGTATCAGTAACTGGTTGGCCTGGTAT |
| | | | CAGCAGAAACCAGGGAAAGCCCCTAAACTCCTGATCTATAAGGCGTCTAATTTA |
| | | | GAAAGTGGGGTCTCATCAAGGTTCAGCGGCAGTGGATCTGGGACAGAATTCACT |
| | | | CTCACCATCAGCAGCCTGCAGCCTGATGATGTTGCAACTTATCACTGCCAACAGT |
| | | | ATAATAGTTATACTTTCGGCGGAGGGACCAAGGTGGAGATCAAA |
| 745 | KY22- | Amino acid sequence of KY22 | EVQLVESGGSVVRPGGSLRLSCAASGFSFDASGMSWIRQAPGKGLEWVSGINYIG |
| | V_{H} | heavy chain variable region | GSTGYADSVKGRFTISRDNAKNSLYLQMNSLRADDTALYYCAREVYSSTWYDDYW |
| | | | GQGTLVTVSS |
| 746 | KY22- | Nucleic acid sequence of KY22 | GAGGTGCAGCTGGTGGAGTCTGGGGGAAGTGTTGTACGGCCGGGGGGGTCCCT |
| | V_{H} | heavy chain variable region | GAGACTCTCCTGTGCAGCCTCTGGATTCTCCTTTGATGCTTCTGGCATGAGCTG |
| | | | GATCCGCCAAGCTCCAGGGAAGGGCCTGGAGTGGGTCTCTGGTATTAATTACAT |
| | | | TGGTGGTAGCACAGGTTATGCAGACTCTGTGAAGGGCCGATTCACCATCTCCAG |
| | | | AGACAACGCCAAGAACTCCCTGTATCTCCAAATGAACAGTCTGAGAGCCGACGA |
| | | | CACGGCCTTGTATTACTGTGCGCGAGAGGTTTATAGCAGCACCTGGTACGATGA |
| | | | CTACTGGGGCCAGGGAACCCTGGTCACCGTCTCCTCA |
| 747 | KY22- | Amino acid sequence of KY22 | DIQMTQSPSSLSTSVGDRVTITCRASQSINTYLNWYQQKSGKAPKLLIYAASSLRS |
| | V_{L} | light chain variable region | GVPSRFSGSGSGTDFTLTINNLQPEDFATYYCQQSYRTPLIFGGGAKVEIK |
| 748 | KY22- | Nucleic acid sequence of KY22 | GACATCCAGATGACCCAGTCTCCTTCCTCCCTGTCTACATCTGTAGGAGACAGA |
| | V_{L} | light chain variable region | GTCACCATCACTTGCCGGGCAAGTCAGAGCATTAACACCTATTTAAATTGGTATC |
| | | | AGCAGAAATCAGGGAAAGCCCCTAAACTCCTGATCTATGCTGCATCCAGTTTGC |
| | | | GAAGTGGGGTTCCATCAAGGTTCAGTGGCAGTGGATCGGGGACAGATTTCACTC |
| | | | TCACCATCAACAATCTACAACCTGAAGATTTTGCAACTTACTACTGTCAACAGAG |
| | | | TTACAGGACCCCGCTCACTTTCGGCGGAGGGGCCAAGGTGGAGATCAAA |
| 749 | KY23- | Amino acid sequence of KY23 | EVQLVESGGGLVQPGRSLRLSCAASGFTFDDYAMHWVRQVPGKGLEWVSGISWN |
| | V_{H} | heavy chain variable region | SITIGYAGSVKGRFTISRDNAKNSLYLQMNSLRVEDTALYYCSKDIGVMKYFGLDV |
| | | | WGQGTMVTVSS |
| 750 | KY23- | Nucleic acid sequence of KY23 | GAAGTGCAACTGGTGGAGTCTGGGGGAGGCTTGGTACAGCCTGGCAGGTCCCT |
| | V_{H} | heavy chain variable region | GAGACTCTCCTGTGCAGCCTCTGGATTCACCTTTGATGATTATGCCATGCACTG |
| | | | GGTCCGGCAAGTTCCAGGGAAGGGCCTGGAGTGGGTCTCAGGTATTAGTTGGA |
| | | | ATAGTATTACCATAGGCTATGCGGGCTCTGTGAAGGGCCGATTCACCATCTCCA |
| | | | GAGACAACGCCAAAAACTCCCTGTATCTACAAATGAACAGTCTGAGAGTTGAGG |
| | | | ACACGGCCTTATATTACTGTTCAAAAGATATAGGAGTCATGAAGTACTTCGGTTT |
| | | | GGACGTCTGGGGCCAAGGGACCATGGTCACCGTCTCCTCA |
| 751 | KY23- | Amino acid sequence of KY23 | DIVMTQSPLSLPVTPGEPASISCRSSQSLLHSNGYNYLDWYLQKPGQSPQLLIHLGS |
| | V_{L} | light chain variable region | IRASGVPDRFSGSGSGTDFTLKISRVEAEDVGVYNCMQALQTPLTFGGGTKVEIK |
| 752 | KY23- | Nucleic acid sequence of KY23 | GATATTGTGATGACTCAGTCTCCGCTCTCCCTGCCCGTCACCCCTGGAGAGCCG |
| | V_{L} | light chain variable region | GCCTCCATCTCCTGCAGGTCTAGTCAGAGCCTCCTGCATAGTAATGGATACAACT |
| | | | ATTTGGATTGGTACCTGCAGAAGCCAGGGCAGTCTCCACAACTCCTGATCCATC |
| | | | TGGGTTCTATTCGGGCCTCCGGGGTCCCTGACAGGTTCAGTGGCAGTGGATCA |
| | | | GGCACAGATTTTACACTGAAAATCAGTAGAGTGGAGGCTGAGGATGTTGGGGTT |
| | | | TATAACTGCATGCAAGCTCTACAAACTCCGCTCACTTTCGGCGGAGGGACCAAG |
| | | | GTGGAGATCAAA |

1-55. (canceled)

56. An antibody or fragment that comprises one or more TIGIT binding sites, wherein each binding site specifically binds to TIGIT and comprises a heavy chain variable (V_{H}) domain and a light chain variable (V_{L}) domain; wherein
(i) the V_{H} domain comprises an amino acid sequence at least 85% identical to SEQ ID NO:603 and the V_{L} domain comprises an amino acid sequence at least 85% identical to SEQ ID NO:613;
(ii) the V_{H} domain comprises an amino acid sequence at least 85% identical to SEQ ID NO:623 and the V_{L} domain comprises an amino acid sequence at least 85% identical to SEQ ID NO:633;
(iii) the V_{H} domain comprises an amino acid sequence at least 85% identical to SEQ ID NO:643 and the V_{L} domain comprises an amino acid sequence at least 85% identical to SEQ ID NO:653; or
(iv) the V_{H} domain comprises an amino acid sequence at least 85% identical to SEQ ID NO:663 and the V_{L} domain comprises an amino acid sequence at least 85% identical to SEQ ID NO:673.

57. The antibody or fragment according to claim 56, wherein
(i) the V_{H} domain of the antibody or fragment comprises the CDRH3 sequence of SEQ ID NO:599 or 602, the CDRH2 sequence of SEQ ID NO:598 or 601, and the CDRH1 sequence of SEQ ID NO:597 or 600; and the V_{L} domain of the antibody or fragment comprises the CDRL3 sequence of SEQ ID NO:609 or 612, the CDRL2 sequence of SEQ ID NO:608 or 611, and the CDRL1 sequence of SEQ ID NO:607 or 610;
(ii) the V_{H} domain of the antibody or fragment comprises the CDRH3 sequence of SEQ ID NO:619 or 622, the CDRH2 sequence of SEQ ID NO:618 or 621, and the CDRH1 sequence of SEQ ID NO:617 or 620; and the V_{L} domain of the antibody or fragment comprises the CDRL3 sequence of SEQ ID NO:629 or 632, the CDRL2 sequence of SEQ ID NO:628 or 631, and the CDRL1 sequence of SEQ ID NO:627 or 630;
(iii) the V_{H} domain of the antibody or fragment comprises the CDRH3 sequence of SEQ ID NO:639 or 642, the CDRH2 sequence of SEQ ID NO:638 or 641, and the CDRH1 sequence of SEQ ID NO:637 or 640; and the V_{L} domain of the antibody or fragment comprises the CDRL3 sequence of SEQ ID NO:649 or 652, the CDRL2 sequence of SEQ ID NO:648 or 651, and the CDRL1 sequence of SEQ ID NO:647 or 650; or
(iv) the V_{H} domain of the antibody or fragment comprises the CDRH3 sequence of SEQ ID NO:659 or 662, the CDRH2 sequence of SEQ ID NO:658 or 661, and the CDRH1 sequence of SEQ ID NO:657 or 660; and the V_{L} domain of the antibody or fragment comprises the CDRL3 sequence of SEQ ID NO:669 or 672, the CDRL2 sequence of SEQ ID NO:668 or 671, and the CDRL1 sequence of SEQ ID NO:667 or 670.

58. The antibody or fragment of claim 56, comprising first and second copies of said V_{H} domain and/or said V_{L} domain.

59. The antibody or fragment of claim 56, wherein the V_{H} domain further comprises a heavy chain constant region, wherein the heavy chain constant region comprises a human IgG1 or IgG4 constant region; and wherein the V_{L} domain further comprises a light chain constant region, wherein the light chain constant region comprises a human kappa or lambda constant region.

60. The antibody or fragment of claim 56, wherein
(i) the V_{H} domain is encoded by a nucleotide sequence that is derived from the recombination of a human V_{H} gene segment, DH gene segment and J_{H} gene segment, wherein the V_{H} gene segment is selected from IGHV3-11, IGHV3-15, IGHV3-20, IGHV3-9, and IGHV4-4; and
(ii) the V_{L} domain is encoded by a nucleotide sequence that is derived from the recombination of a human V_{L} gene segment and J_{L} gene segment, wherein the V_{L} gene segment is selected from IGKV1-39, IGKV1 D-39, IGKV1-5, IGLV3-1, IGKV2-28, and IGLV3-10.

61. The antibody or fragment according to claim 60, wherein the DH gene segment is a human gene segment selected from IGHD3-10, IGHD3-9, IGHD6-13, IGHD6-19, IGHD1-14, IGHD2-21, IGHD4-17, and IGHD4-23 and/or the J_{H} gene segment is a human gene segment selected from IGHJ4, IGHJ5, and IGHJ6.

62. The antibody or fragment according to claim 60, wherein the V_{L} domain is a V_{κ} and the J_{L} gene segment is a human gene segment selected from IGKJ2*04 and IGKJ4*01; or the V_{L} domain is a V_{λ} and the J_{L} gene segment is a human gene segment selected from IGLJ1*01, IGLJ2*01, and IGLJ3*02.

63. The antibody or fragment of claim 56, which specifically binds to a human TIGIT comprising SEQ ID NO:540 or 544, a cynomolgus TIGIT comprising SEQ ID NO:547 or 549, and/or a mouse TIGIT comprising SEQ ID NO:556 or 559.

64. The antibody or fragment of claim 56, further comprising another antigen-binding site, optionally wherein the another antigen-binding site specifically binds human PD-L1, human ICOS, or TIGIT.

65. An anti-TIGIT immunocytokine comprising an immunoglobulin heavy chain and an optionally an immunoglobulin light chain, wherein the immunocytokine comprises an antigen-binding site that specifically binds TIGIT.

66. A method of inhibiting TIGIT-mediated suppression of T-cells and/or NK cells that express TIGIT in a subject, comprising administering an effective amount of the antibody or fragment of claim 56.

67. A method of increasing T- and/or NK cell proliferation, cytokine production by T- and/or NK cells, or degranulation of tumour antigen-specific CD8+ T cells and/or TIL CD8+ T cells in a subject, comprising administering an effective amount of the antibody or fragment of claim 56.

68. A method of inhibiting TIGIT-meditated immune suppression of human Treg cells that express TIGIT in a subject, comprising administering an effective amount of the antibody or fragment of claim 56.

69. A method of treating a cancer in a subject, comprising administering the antibody or fragment of claim 56 in an amount effective to:
(i) inhibit the binding of TIGIT to CD155 in a tumor microenvironment;
(ii) inhibit P-Tyr and/or NFkβ signalling in TIGIT⁺ T- and/or NK cells;
(iii) inhibit tumor cell-mediated suppression of T- and/or NK cells in a tumor microenvironment of the cancer; and/or
(iv) reduce TIGIT-mediated inhibition of one or more T-cell factors in a tumor microenvironment of said cancer, wherein each factor is selected from T-bet, GATA3, IFN regulatory factor (IFR)4, RORc, IL-2, and IFN-γ.

70. A method of treating or preventing a TIGIT-mediated disease or condition, comprising administering an effective amount of the antibody or fragment of claim 56.

71. The method of claim 72, further comprising administering to the subject a further therapy.

72. A pharmaceutical composition comprising the antibody or fragment of claim 56 and a pharmaceutically acceptable excipient, diluent, or carrier.

73. The pharmaceutical composition of claim 72, in combination with a further therapeutic agent.

74. A nucleic acid that encodes a V_{H} domain and/or a V_{L} domain of the antibody or fragment of claim 56.

75. A vector comprising the nucleic acid of claim 74.

76. A host cell comprising the vector of claim 75.

The application's sequence listing, which the Patent Office published only in electronic form, follows.

SEQUENCE LISTING (752 sequences)

SEQ ID NO: 1 - protein, 290 aa, Homo Sapien
MRIFAVFIFMTYWHLLNAFTVTVPKDLYVVEYGSNMTIECKFPVEKQLDLAALIVYWEMEDKNIIQFVHGEEDLKVQHSSYRQRARLLKDQLSLGNAALQITDVKLQDAGVYRCMISYGGADYKRITVKVNAPYNKINQRILVVDPVTSEHELTCQAEGYPKAEVIWTSSDHQVLSGKTTTTNSKREEKLFNVTSTLRINTTTNEIFYCTFRRLDPEENHTAELVIPELPLAHPPNERTHLVILGAILLCLGVALTFIFRLRKGRMMDVKKCGIQDTNSKKQSDTHLEET

SEQ ID NO: 2 - protein, 241 aa, Cynomologus
MGWSCIILFLVATATGVHSMFTVTVPKDLYVVEYGSNMTIECKFPVEKQLDLTSLIVYWEMEDKNIIQFVHGEEDLKVQHSNYRQRAQLLKDQLSLGNAALRITDVKLQDAGVYRCMISYGGADYKRITVKVNAPYNKINQRILVVDPVTSEHELTCQAEGYPKAEVIWTSSDHQVLSGKTTTTNSKREEKLLNVTSTLRINTTANEIFYCIFRRLDPEENHTAELVIPELPLALPPNERT

SEQ ID NO: 3 - protein, 245 aa, Homo Sapien
MRIFAVFIFMTYWHLLNAFTVTVPKDLYVVEYGSNMTIECKFPVEKQLDLAALIVYWEMEDKNIIQFVHGEEDLKVQHSSYRQRARLLKDQLSLGNAALQITDVKLQDAGVYRCMISYGGADYKRITVKVNAPYNKINQRILVVDPVTSEHELTCQAEGYPKAEVIWTSSDHQVLSGKTTTTNSKREEKLFNVTSTLRINTTTNEIFYCTFRRLDPEENHTAELVIPELPLAHPPNERTHHHHHH

SEQ ID NO: 4 - protein, 475 aa, Homo Sapien
MRIFAVFIFMTYWHLLNAFTVTVPKDLYVVEYGSNMTIECKFPVEKQLDLAALIVYWEMEDKNIIQFVHGEEDLKVQHSSYRQRARLLKDQLSLGNAALQITDVKLQDAGVYRCMISYGGADYKRITVKVNAPYNKINQRILVVDPVTSEHELTCQAEGYPKAEVIWTSSDHQVLSGKTTTTNSKREEKLFNVTSTLRINTTTNEIFYCTFRRLDPEENHTAELVIPELPLAHPPNERTIEGREPKSCDKTHTCPPCPAPELLGGPSVFLFPPKPKDTLMISRTPEVTCVVVDVSHEDPEVKFNWYVDGVEVHNAKTKPREEQYNSTYRVVSVLTVLHQDWLNGKEYKCKVSNKALPAPIEKTISKAKGQPREPQVYTLPPSRDELTKNQVSLTCLVKGFYPSDIAVEWESNGQPENNYKTTPPVLDSDGSFFLYSKLTVDKSRWQQGNVFSCSVMHEALHNHYTQKSLSLSPGK

SEQ ID NO: 5 - protein, 249 aa, Cynomologus
MGWSCIILFLVATATGVHSMFTVTVPKDLYVVEYGSNMTIECKFPVEKQLDLTSLIVYWEMEDKNIIQFVHGEEDLKVQHSNYRQRAQLLKDQLSLGNAALRITDVKLQDAGVYRCMISYGGADYKRITVKVNAPYNKINQRILVVDPVTSEHELTCQAEGYPKAEVIWTSSDHQVLSGKTTTTNSKREEKLLNVTSTLRINTTANEIFYCIFRRLDPEENHTAELVIPELPLALPPNERTDYKDDDDK

SEQ ID NO: 6 - protein, 405 aa, Homo Sapien
MGWSCIILFLVATATGVHSLDSPDRPWNPPTFSPALLVVTEGDNATFTCSFSNTSESFVLNWYRMSPSNQTDKLAAFPEDRSQPGQDCRFRVTQLPNGRDFHMSVVRARRNDSGTYLCGAISLAPKAQIKESLRAELRVTERRAEVPTAHPSPSPRPAGQKLENLYFQGIEGRMDEPKSCDKTHTCPPCPAPELLGGPSVFLFPPKPKDTLMISRTPEVTCVVVDVSHEDPEVKFNWYVDGVEVHNAKTKPREEQYNSTYRVVSVLTVLHQDWLNGKEYKCKVSNKALPAPIEKTISKAKGQPREPQVYTLPPSRDELTKNQVSLTCLVKGFYPSDIAVEWESNGQPENNYKTTPPVLDSDGSFFLYSKLTVDKSRWQQGNVFSCSVMHEALHNHYTQKSLSLSP

SEQ ID NO: 7 - protein, 8 aa, Homo Sapien
GFTFDDYA

SEQ ID NO: 8 - protein, 8 aa, Homo Sapien
ISWKSNII

SEQ ID NO: 9 - protein, 15 aa, Homo Sapien
ARDITGSGSYGWFDP

SEQ ID NO: 10 - protein, 5 aa, Homo Sapien
DYAMH

SEQ ID NO: 11 - protein, 17 aa, Homo Sapien
GISWKSNIIGYADSVKG

SEQ ID NO: 12 - protein, 13 aa, Homo Sapien
DITGSGSYGWFDP

SEQ ID NO: 13 - protein, 122 aa, Homo Sapien
EVQLVESGGGLVQPGRSLRLSCAASGFTFDDYAMHWVRQTPGKGLEWVSGISWKSNIIGYADSVKGRFTISRDNAKNSLYLQMNSLRAEDTALYYCARDITGSGSYGWFDPWGQGTLVTVSS

SEQ ID NO: 14 - DNA, 508 bp, Homo Sapien
caagaaaaagcttgccgccaccatggagtttgggctgagctggattttccttttggctattttaaaaggtgtccagtgtgaagtacaattggtggagtccgggggaggcttggtacagcctggcaggtccctgagactctcctgtgcagcctctggattcacctttgatgattatgccatgcactgggtccgacaaactccagggaagggcctggagtgggtctcaggtataagttggaagagtaatatcataggctatgcggactctgtgaagggccgattcaccatctccagagacaacgccaagaactccctgtatctgcaaatgaacagtctgagagctgaggacacggccttgtattattgtgcaagagatataacgggttcggggagttatggctggttcgacccctggggccagggaaccctggtcaccgtctcctcagccaaaacgacacccccatctgtctatccactggcccctgaatctgctaaaactcagcctccg

SEQ ID NO: 15 - protein, 449 aa, Homo Sapien
EVQLVESGGGLVQPGRSLRLSCAASGFTFDDYAMHWVRQTPGKGLEWVSGISWKSNIIGYADSVKGRFTISRDNAKNSLYLQMNSLRAEDTALYYCARDITGSGSYGWFDPWGQGTLVTVSSASTKGPSVFPLAPCSRSTSESTAALGCLVKDYFPEPVTVSWNSGALTSGVHTFPAVLQSSGLYSLSSVVTVPSSSLGTKTYTCNVDHKPSNTKVDKRVESKYGPPCPPCPAPEFEGGPSVFLFPPKPKDTLMISRTPEVTCVVVDVSQEDPEVQFNWYVDGVEVHNAKTKPREEQFNSTYRVVSVLTVLHQDWLNGKEYKCKVSNKGLPSSIEKTISKAKGQPREPQVYTLPPSQEEMTKNQVSLTCLVKGFYPSDIAVEWESNGQPENNYKTTPPVLDSDGSFFLYSRLTVDKSRWQEGNVFSCSVMHEALHNHYTQKSLSLSLGK

SEQ ID NO: 16 - DNA, 1356 bp, Homo Sapien
gaagtgcagctggtggaatctggcggcggactggtgcagcctggcagatccctgagactgtcttgtgccgcctccggcttcaccttcgacgactacgctatgcactgggtgcgacagacccctggcaagggcctggaatgggtgtccggcatctcctggaagtccaacatcatcggctacgccgactccgtgaagggccggttcaccatctcccgggacaacgccaagaactccctgtacctgcagatgaacagcctgcgggccgaggacaccgccctgtactactgcgccagagacatcaccggctccggctcctacggatggttcgatccttggggccagggcaccctcgtgaccgtgtcctctgccagcaccaagggcccctctgtgttccctctggccccttccagcaagtccacctctggcggaacagccgctctgggctgcctcgtgaaggactacttccccgagcctgtgaccgtgtcctggaactctggcgctctgaccagcggagtgcacaccttccctgctgtgctgcagtcctccggcctgtactccctgtcctccgtcgtgaccgtgccttccagctctctgggcacccagacctacatctgcaacgtgaaccacaagccctccaacaccaaggtggacaagaaggtggaacccaagtcctgcgacaagacccacacctgtcccccttgtcctgcccctgaactgctgggcggaccttccgtgttcctgttccccccaaagcccaaggacaccctgatgatctcccggacccccgaagtgacctgcgtggtggtggatgtgtcccacgaggaccctgaagtgaagttcaattggtacgtggacggcgtggaagtgcacaacgccaagaccaagcctagagaggaacagtacaactccacctaccgggtggtgtccgtgctgaccgtgctgcaccaggattggctgaacggcaaagagtacaagtgcaaggtgtccaacaaggccctgcctgcccccatcgaaaagaccatctccaaggccaagggccagccccgggaaccccaggtgtacacactgccccctagcagggacgagctgaccaagaaccaggtgtccctgacctgtctcgtgaaaggcttctacccctccgatatcgccgtggaatgggagtccaacggccagcctgagaacaactacaagaccaccccccctgtgctggactccgacggctcattcttcctgtacagcaagctgacagtggacaagtcccggtggcagcagggcaacgtgttctcctgctccgtgatgcacgaggccctgcacaaccactacacccagaagtccctgtccctgagccccggcaag

SEQ ID NO: 17 - protein, 6 aa, Homo Sapien
QSISSY

SEQ ID NO: 18 - protein, 3 aa, Homo Sapien
VAS

SEQ ID NO: 19 - protein, 9 aa, Homo Sapien
QQSYSNPIT

SEQ ID NO: 20 - protein, 11 aa, Homo Sapien
RASQSISSYLN

SEQ ID NO: 21 - protein, 7 aa, Homo Sapien
VASSLQS

SEQ ID NO: 22 - protein, 9 aa, Homo Sapien
QQSYSNPIT

SEQ ID NO: 23 - protein, 107 aa, Homo Sapien
DIQMTQSPSSLSASVGDRVTITCRASQSISSYLNWYQQKPGKAPKPLIYVASSLQSGVPSSFSGSGSGTDFTLTISSLQPEDFATYYCQQSYSNPITFGQGTRLEIK

SEQ ID NO: 24 - DNA, 321 bp, Homo Sapien
gacatccagatgacccagtctccatcctccctgtctgcatctgtaggagacagagtcaccatcacttgccgggcaagtcagagcattagcagctatttaaattggtatcagcagaaaccagggaaagcccctaagcccctgatctatgttgcatccagtttgcaaagtggggtcccatcaagtttcagtggcagtggatctgggacagatttcactctcaccatcagcagtctgcaacctgaagattttgcaacttactactgtcaacagagttacagtaatccgatcaccttcggccaagggacacgactggagatcaaa

SEQ ID NO: 25 - protein, 214 aa, Homo Sapien
DIQMTQSPSSLSASVGDRVTITCRASQSISSYLNWYQQKPGKAPKPLIYVASSLQSGVPSSFSGSGSGTDFTLTISSLQPEDFATYYCQQSYSNPITFGQGTRLEIKRTVAAPSVFIFPPSDEQLKSGTASVVCLLNNFYPREAKVQWKVDNALQSGNSQESVTEQDSKDSTYSLSSTLTLSKADYEKHKVYACEVTHQGLSSPVTKSFNRGEC

SEQ ID NO: 26 - DNA, 642 bp, Homo Sapien
gacatccagatgacccagtctccatcctccctgtctgcatctgtaggagacagagtcaccatcacttgccgggcaagtcagagcattagcagctatttaaattggtatcagcagaaaccagggaaagcccctaagcccctgatctatgttgcatccagtttgcaaagtggggtcccatcaagtttcagtggcagtggatctgggacagatttcactctcaccatcagcagtctgcaacctgaagattttgcaacttactactgtcaacagagttacagtaatccgatcaccttcggccaagggacacgactggagatcaaacgtacggtggccgctccctccgtgttcatcttcccaccttccgacgagcagctgaagtccggcaccgcttctgtcgtgtgcctgctgaacaacttctacccccgcgaggccaaggtgcagtggaaggtggacaacgccctgcagtccggcaactcccaggaatccgtgaccgagcaggactccaaggacagcacctactccctgtcctccaccctgaccctgtccaaggccgactacgagaagcacaaggtgtacgcctgcgaagtgacccaccagggcctgtctagccccgtgaccaagtctttcaaccggggcgagtgt

SEQ ID NO: 27 - protein, 8 aa, Homo Sapien
GFTFDDYA

SEQ ID NO: 28 - protein, 8 aa, Homo Sapien
ISWIRTGI

SEQ ID NO: 29 - protein, 16 aa, Homo Sapien
AKDMKGSGTYGGWFDT

SEQ ID NO: 30 - protein, 5 aa, Homo Sapien
DYAMH

SEQ ID NO: 31 - protein, 17 aa, Homo Sapien
GISWIRTGIGYADSVKG

SEQ ID NO: 32 - protein, 14 aa, Homo Sapien
DMKGSGTYGGWFDT

SEQ ID NO: 33 - protein, 123 aa, Homo Sapien
EVQLVESGGGLVQPGRSLRLSCAASGFTFDDYAMHWVRQVPGKGLEWVSGISWIRTGIGYADSVKGRFTIFRDNAKNSLYLQMNSLRAEDTALYYCAKDMKGSGTYGGWFDTWGQGTLVTVSS

SEQ ID NO: 34 - DNA, 482 bp, Homo Sapien
aagcttgccgccaccatggagtttgggctgagctggattttccttttggctattttaaaaggtgtccagtgtgaagtgcagctggtggagtctgggggaggcttggtgcagcctggcaggtccctgagactctcctgtgcagcctctggattcacctttgatgattatgccatgcactgggtccggcaagttccagggaagggcctggaatgggtctcaggcattagttggattcgtactggcataggctatgcggactctgtgaagggccgattcaccattttcagagacaacgccaagaattccctgtatctgcaaatgaacagtctgagagctgaggacacggccttgtattactgtgcaaaagatatgaagggttcggggacttatggggggtggttcgacacctggggccagggaaccctggtcaccgtctcctcagccaaaacaacagccccatcggtctatccactggcccctgc

SEQ ID NO: 35 - protein, 450 aa, Homo Sapien
EVQLVESGGGLVQPGRSLRLSCAASGFTFDDYAMHWVRQVPGKGLEWVSGISWIRTGIGYADSVKGRFTIFRDNAKNSLYLQMNSLRAEDTALYYCAKDMKGSGTYGGWFDTWGQGTLVTVSSASTKGPSVFPLAPCSRSTSESTAALGCLVKDYFPEPVTVSWNSGALTSGVHTFPAVLQSSGLYSLSSVVTVPSSSLGTKTYTCNVDHKPSNTKVDKRVESKYGPPCPPCPAPEFEGGPSVFLFPPKPKDTLMISRTPEVTCVVVDVSQEDPEVQFNWYVDGVEVHNAKTKPREEQFNSTYRVVSVLTVLHQDWLNGKEYKCKVSNKGLPSSIEKTISKAKGQPREPQVYTLPPSQEEMTKNQVSLTCLVKGFYPSDIAVEWESNGQPENNYKTTPPVLDSDGSFFLYSRLTVDKSRWQEGNVFSCSVMHEALHNHYTQKSLSLSLGK

SEQ ID NO: 36 - DNA, 1359 bp, Homo Sapien
gaagtgcagctggtggaatctggcggcggactggtgcagcctggcagatccctgagactgtcttgtgccgcctccggcttcaccttcgacgactacgctatgcactgggtgcgacaggtgccaggcaagggcctggaatgggtgtccggcatctcttggatccggaccggcatcggctacgccgactctgtgaagggccggttcaccatcttccgggacaacgccaagaactccctgtacctgcagatgaacagcctgcgggccgaggacaccgccctgtactactgcgccaaggacatgaagggctccggcacctacggcggatggttcgatacttggggccagggcaccctcgtgaccgtgtcctctgccagcaccaagggcccctctgtgttccctctggccccttccagcaagtccacctctggcggaacagccgctctgggctgcctcgtgaaggactacttccccgagcctgtgaccgtgtcctggaactctggcgctctgaccagcggagtgcacaccttccctgctgtgctgcagtcctccggcctgtactccctgtcctccgtcgtgaccgtgccttccagctctctgggcacccagacctacatctgcaacgtgaaccacaagccctccaacaccaaggtggacaagaaggtggaacccaagtcctgcgacaagacccacacctgtcccccttgtcctgcccctgaactgctgggcggaccttccgtgttcctgttccccccaaagcccaaggacaccctgatgatctcccggacccccgaagtgacctgcgtggtggtggatgtgtcccacgaggaccctgaagtgaagttcaattggtacgtggacggcgtggaagtgcacaacgccaagaccaagcctagagaggaacagtacaactccacctaccgggtggtgtccgtgctgaccgtgctgcaccaggattggctgaacggcaaagagtacaagtgcaaggtgtccaacaaggccctgcctgcccccatcgaaaagaccatctccaaggccaagggccagccccgggaaccccaggtgtacacactgccccctagcagggacgagctgaccaagaaccaggtgtccctgacctgtctcgtgaaaggcttctacccctccgatatcgccgtggaatgggagtccaacggccagcctgagaacaactacaagaccaccccccctgtgctggactccgacggctcattcttcctgtacagcaagctgacagtggacaagtcccggtggcagcagggcaacgtgttctcctgctccgtgatgcacgaggccctgcacaaccactacacccagaagtccctgtccctgagccccggcaag

SEQ ID NO: 37 - protein, 6 aa, Homo Sapien
QSISSY

SEQ ID NO: 38 - protein, 3 aa, Homo Sapien
VAS

SEQ ID NO: 39 - protein, 9 aa, Homo Sapien
QQSYSTPIT

SEQ ID NO: 40 - protein, 11 aa, Homo Sapien
RASQSISSYLN

SEQ ID NO: 41 - protein, 7 aa, Homo Sapien
VASSLQS

SEQ ID NO: 42 - protein, 9 aa, Homo Sapien
QQSYSTPIT

SEQ ID NO: 43 - protein, 107 aa, Homo Sapien
DIQMTQSPSSLSASVGDRVTITCRASQSISSYLNWYQQKPGKAPKLLIYVASSLQSGVPSRFSGSGSGTDFTLTISSLQPEDFATYYCQQSYSTPITFGQGTRLEIK

SEQ ID NO: 44 - DNA, 418 bp, Homo Sapien
aaagcttgccgccaccatgaggctccctgctcagcttctggggctcctgctactctggctccgaggtgccagatgtgacatccagatgacccagtctccatcctccctgtctgcatctgtaggagacagagtcaccatcacttgccgggcaagtcagagcattagcagctatttaaattggtatcagcagaaaccagggaaagcccctaaactcctgatctatgttgcatccagtttgcaaagtggggtcccatcaaggttcagtggcagtggatctgggacagatttcactctcactatcagcagtctgcaacctgaagattttgcaacttactactgtcaacagagttacagtaccccgatcaccttcggccaagggacacgtctggagatcaaacgtacggatgctgcaccaact

SEQ ID NO: 45 - protein, 214 aa, Homo Sapien
DIQMTQSPSSLSASVGDRVTITCRASQSISSYLNWYQQKPGKAPKLLIYVASSLQSGVPSRFSGSGSGTDFTLTISSLQPEDFATYYCQQSYSTPITFGQGTRLEIKRTVAAPSVFIFPPSDEQLKSGTASVVCLLNNFYPREAKVQWKVDNALQSGNSQESVTEQDSKDSTYSLSSTLTLSKADYEKHKVYACEVTHQGLSSPVTKSFNRGEC

SEQ ID NO: 46 - DNA, 642 bp, Homo Sapien
gacatccagatgacccagtccccctccagcctgtctgcttccgtgggcgacagagtgaccatcacctgtcgggcctcccagtccatctcctcctacctgaactggtatcagcagaagcccggcaaggcccccaagctgctgatctacgtggccagctctctgcagtccggcgtgccctctagattctccggctctggctctggcaccgactttaccctgaccatcagctccctgcagcccgaggacttcgccacctactactgccagcagtcctactccacccctatcaccttcggccagggcacccggctggaaatcaaacgtacggtggccgctccctccgtgttcatcttcccaccttccgacgagcagctgaagtccggcaccgcttctgtcgtgtgcctgctgaacaacttctacccccgcgaggccaaggtgcagtggaaggtggacaacgccctgcagtccggcaactcccaggaatccgtgaccgagcaggactccaaggacagcacctactccctgtcctccaccctgaccctgtccaaggccgactacgagaagcacaaggtgtacgcctgcgaagtgacccaccagggcctgtctagccccgtgaccaagtctttcaaccggggcgagtgt

SEQ ID NO: 47 - protein, 450 aa, Homo Sapien
EVQLVESGGGLVQPGRSLRLSCAASGFTFDDYAMHWVRQAPGKGLEWVSGISWIRTGIGYADSVKGRFTIFRDNAKNSLYLQMNSLRAEDTALYYCAKDMKGSGTYGGWFDTWGQGTLVTVSSASTKGPSVFPLAPCSRSTSESTAALGCLVKDYFPEPVTVSWNSGALTSGVHTFPAVLQSSGLYSLSSVVTVPSSSLGTKTYTCNVDHKPSNTKVDKRVESKYGPPCPPCPAPELAGAPSVFLFPPKPKDTLMISRTPEVTCVVVDVSQEDPEVQFNWYVDGVEVHNAKTKPREEQFNSTYRVVSVLTVLHQDWLNGKEYKCKVSNKGLPSSIEKTISKAKGQPREPQVYTLPPSQEEMTKNQVSLTCLVKGFYPSDIAVEWESNGQPENNYKTTPPVLDSDGSFFLYSRLTVDKSRWQEGNVFSCSVMHEALHNHYTQKSLSLSLGK

SEQ ID NO: 48 - protein, 450 aa, Homo Sapien
EVQLVESGGGLVQPGRSLRLSCAASGFTFDDYAMHWVRQVPGKGLEWVSGISWIRTGIGYADSVKGRFTISRDNAKNSLYLQMNSLRAEDTALYYCAKDMKGSGTYGGWFDTWGQGTLVTVSSASTKGPSVFPLAPCSRSTSESTAALGCLVKDYFPEPVTVSWNSGALTSGVHTFPAVLQSSGLYSLSSVVTVPSSSLGTKTYTCNVDHKPSNTKVDKRVESKYGPPCPPCPAPELAGAPSVFLFPPKPKDTLMISRTPEVTCVVVDVSQEDPEVQFNWYVDGVEVHNAKTKPREEQFNSTYRVVSVLTVLHQDWLNGKEYKCKVSNKGLPSSIEKTISKAKGQPREPQVYTLPPSQEEMTKNQVSLTCLVKGFYPSDIAVEWESNGQPENNYKTTPPVLDSDGSFFLYSRLTVDKSRWQEGNVFSCSVMHEALHNHYTQKSLSLSLGK

SEQ ID NO: 49 - protein, 448 aa, Homo Sapien
EVQLVESGGGLVQPGRSLRLSCAASGFTFDDYAMHWVRQVPGKGLEWVSGISWIRTGIGYADSVKGRFTIFRDNAKNSLYLQMNSLRAEDTALYYCAKDMKGSGTYGGWFDTWGQGTLVTVSSASTKGPSVFPLAPCSRSTSESTAALGCLVKDYFPEPVTVSWNSGALTSGVHTFPAVLQSSGLYSLSSVVTVPSSSLGTKTYTCNVDHKPSNTKVDKRVESKYGPPCPPCPAPVAGPSVFLFPPKPKDTLMISRTPEVTCVVVDVSQEDPEVQFNWYVDGVEVHNAKTKPREEQFNSTYRVVSVLTVLHQDWLNGKEYKCKVSNKGLPSSIEKTISKAKGQPREPQVYTLPPSQEEMTKNQVSLTCLVKGFYPSDIAVEWESNGQPENNYKTTPPVLDSDGSFFLYSRLTVDKSRWQEGNVFSCSVMHEALHNHYTQKSLSLSLGK

SEQ ID NO: 50 - protein, 214 aa, Homo Sapien
DIQMTQSPSSLSASVGDRVTITCRASQSISSYLNWYQQKPGKAPKLLIYAASSLQSGVPSRFSGSGSGTDFTLTISSLQPEDFATYYCQQSYSTPITFGQGTRLEIKRTVAAPSVFIFPPSDEQLKSGTASVVCLLNNFYPREAKVQWKVDNALQSGNSQESVTEQDSKDSTYSLSSTLTLSKADYEKHKVYACEVTHQGLSSPVTKSFNRGEC

SEQ ID NO: 51 - protein, 214 aa, Homo Sapien
DIQMTQSPSSLSASVGDRVTITCRASQSISSYLNWYQQKPGKAPKLFIYVASSLQSGVPSRFSGSGSGTDFTLTISSLQPEDFATYYCQQSYSTPITFGQGTRLEIKRTVAAPSVFIFPPSDEQLKSGTASVVCLLNNFYPREAKVQWKVDNALQSGNSQESVTEQDSKDSTYSLSSTLTLSKADYEKHKVYACEVTHQGLSSPVTKSFNRGEC

SEQ ID NO: 52 - protein, 8 aa, Homo Sapien
GFTFSSYW

SEQ ID NO: 53 - protein, 8 aa, Homo Sapien
IKEDGSEK

SEQ ID NO: 54 - protein, 12 aa, Homo Sapien
ARNRLYSDFLDN

SEQ ID NO: 55 - protein, 5 aa, Homo Sapien
SYWMS

SEQ ID NO: 56 - protein, 17 aa, Homo Sapien
NIKEDGSEKYYVDSVKG

SEQ ID NO: 57 - protein, 10 aa, Homo Sapien
NRLYSDFLDN

SEQ ID NO: 58 - protein, 119 aa, Homo Sapien
EVQLVESGGGLVQPGGSLRLSCAASGFTFSSYWMSWVRQAPGKGLEWVANIKEDGSEKYYVDSVKGRFTISRDNAKNSLYLQMNSLRAEDTSVYYCARNRLYSDFLDNWGQGTLVTVSS

SEQ ID NO: 59 - DNA, 358 bp, Homo Sapien
gaggtgcagctggtggagtctgggggaggcttggtccagcctggggggtccctgagactctcctgtgcagcctctggattcacgtttagtagctattggatgagttgggtccgccaggctccagggaaggggctggagtgggtggccaacatcaaagaagatggaagtgagaaatactatgtcgactctgtgaagggccgattcaccatctccagagacaacgccaagaactcactgtatctgcaaatgaacagcctgagagccgaggacacgtctgtgtattactgtgcgagaaatcgactctacagtgacttccttgacaactggggccagggaaccctggtcaccgtctcctcag

SEQ ID NO: 60 - protein, 449 aa, Homo Sapien
EVQLVESGGGLVQPGGSLRLSCAASGFTFSSYWMSWVRQAPGKGLEWVANIKEDGSEKYYVDSVKGRFTISRDNAKNSLYLQMNSLRAEDTSVYYCARNRLYSDFLDNWGQGTLVTVSSASTKGPSVFPLAPSSKSTSGGTAALGCLVKDYFPEPVTVSWNSGALTSGVHTFPAVLQSSGLYSLSSVVTVPSSSLGTQTYICNVNHKPSNTKVDKKVEPKSCDKTHTCPPCPAPELLGGPSVFLFPPKPKDTLMISRTPEVTCVVVDVSHEDPEVKFNWYVDGVEVHNAKTKPREEQYNSTYRVVSVLTVLHQDWLNGKEYKCKVSNKALPAPIEKTISKAKGQPREPQVYTLPPSRDELTKNQVSLTCLVKGFYPSDIAVEWESNGQPENNYKTTPPVLDSDGSFFLYSKLTVDKSRWQQGNVFSCSVMHEALHNHYTQKSLSLSPGK

SEQ ID NO: 61 - DNA, 1347 bp, Homo Sapien
gaggtgcagctggtggagtctgggggaggcttggtccagcctggggggtccctgagactctcctgtgcagcctctggattcacgtttagtagctattggatgagttgggtccgccaggctccagggaaggggctggagtgggtggccaacatcaaagaagatggaagtgagaaatactatgtcgactctgtgaagggccgattcaccatctccagagacaacgccaagaactcactgtatctgcaaatgaacagcctgagagccgaggacacgtctgtgtattactgtgcgagaaatcgactctacagtgacttccttgacaactggggccagggaaccctggtcaccgtctcctcagccagcaccaagggcccctctgtgttccctctggccccttccagcaagtccacctctggcggaacagccgctctgggctgcctcgtgaaggactacttccccgagcctgtgaccgtgtcctggaactctggcgctctgaccagcggagtgcacaccttccctgctgtgctgcagtcctccggcctgtactccctgtcctccgtcgtgaccgtgccttccagctctctgggcacccagacctacatctgcaacgtgaaccacaagccctccaacaccaaggtggacaagaaggtggaacccaagtcctgcgacaagacccacacctgtcccccttgtcctgcccctgaactgctgggcggaccttccgtgttcctgttccccccaaagcccaaggacaccctgatgatctcccggacccccgaagtgacctgcgtggtggtggatgtgtcccacgaggaccctgaagtgaagttcaattggtacgtggacggcgtggaagtgcacaacgccaagaccaagcctagagaggaacagtacaactccacctaccgggtggtgtccgtgctgaccgtgctgcaccaggattggctgaacggcaaagagtacaagtgcaaggtgtccaacaaggccctgcctgcccccatcgaaaagaccatctccaaggccaagggccagccccgggaaccccaggtgtacacactgccccctagcagggacgagctgaccaagaaccaggtgtccctgacctgtctcgtgaaaggcttctacccctccgatatcgccgtggaatgggagtccaacggccagcctgagaacaactacaagaccaccccccctgtgctggactccgacggctcattcttcctgtacagcaagctgacagtggacaagtcccggtggcagcagggcaacgtgttctcctgctccgtgatgcacgaggccctgcacaaccactacacccagaagtccctgtccctgagccccggcaag

SEQ ID NO: 62 - protein, 6 aa, Homo Sapien
QGVSSW

SEQ ID NO: 63 - protein, 3 aa, Homo Sapien
GAS

SEQ ID NO: 64 - protein, 9 aa, Homo Sapien
QQANSIPFT

SEQ ID NO: 65 - protein, 11 aa, Homo Sapien
RASQGVSSWLA

SEQ ID NO: 66 - protein, 7 aa, Homo Sapien
GASSLQS

SEQ ID NO: 67 - protein, 9 aa, Homo Sapien
QQANSIPFT

SEQ ID NO: 68 - protein, 107 aa, Homo Sapien
DIQMTQSPSSVSASVGDRVTITCRASQGVSSWLAWYQQKSGKAPKLLIYGASSLQSGVPSRFSGSGSGTEFILTISSLQPEDFATYYCQQANSIPFTFGPGTKVDIK

SEQ ID NO: 69 - DNA, 322 bp, Homo Sapien
gacatccagatgacccagtctccatcttccgtgtctgcatctgtcggagacagagtcaccatcacttgtcgggcgagtcagggtgttagcagctggttagcctggtatcagcagaaatcagggaaagcccctaagctcctgatctatggtgcatccagtttgcaaagtggggtcccatcaagattcagcggcagtggatctgggacagagttcattctcaccatcagcagcctgcagcctgaagattttgcaacttactattgtcaacaggctaacagtatcccattcactttcggccctgggaccaaagtggatatcaaac

SEQ ID NO: 70 - protein, 214 aa, Homo Sapien
DIQMTQSPSSVSASVGDRVTITCRASQGVSSWLAWYQQKSGKAPKLLIYGASSLQSGVPSRFSGSGSGTEFILTISSLQPEDFATYYCQQANSIPFTFGPGTKVDIKRTVAAPSVFIFPPSDEQLKSGTASVVCLLNNFYPREAKVQWKVDNALQSGNSQESVTEQDSKDSTYSLSSTLTLSKADYEKHKVYACEVTHQGLSSPVTKSFNRGEC

SEQ ID NO: 71 - DNA, 642 bp, Homo Sapien
gacatccagatgacccagtctccatcttccgtgtctgcatctgtcggagacagagtcaccatcacttgtcgggcgagtcagggtgttagcagctggttagcctggtatcagcagaaatcagggaaagcccctaagctcctgatctatggtgcatccagtttgcaaagtggggtcccatcaagattcagcggcagtggatctgggacagagttcattctcaccatcagcagcctgcagcctgaagattttgcaacttactattgtcaacaggctaacagtatcccattcactttcggccctgggaccaaagtggatatcaaacgtacggtggccgctccctccgtgttcatcttcccaccttccgacgagcagctgaagtccggcaccgcttctgtcgtgtgcctgctgaacaacttctacccccgcgaggccaaggtgcagtggaaggtggacaacgccctgcagtccggcaactcccaggaatccgtgaccgagcaggactccaaggacagcacctactccctgtcctccaccctgaccctgtccaaggccgactacgagaagcacaaggtgtacgcctgcgaagtgacccaccagggcctgtctagccccgtgaccaagtctttcaaccggggcgagtgt

SEQ ID NO: 72 - protein, 8 aa, Homo Sapien
GFTFSSYW

SEQ ID NO: 73 - protein, 8 aa, Homo Sapien
IKEDGSEK

SEQ ID NO: 74 - protein, 12 aa, Homo Sapien
ARVRLYSDFLDY

SEQ ID NO: 75 - protein, 5 aa, Homo Sapien
SYWMS

SEQ ID NO: 76 - protein, 17 aa, Homo Sapien
NIKEDGSEKYYVDSLKG

SEQ ID NO: 77 - protein, 10 aa, Homo Sapien
VRLYSDFLDY

SEQ ID NO: 78 - protein, 119 aa, Homo Sapien
EVQLVDSGGGLVQPGGSLRLSCAASGFTFSSYWMSWVRQAPGKGLEWVANIKEDGSEKYYVDSLKGRFTISRDNAKNSLYLQMNSLRAEDTSVYYCARVRLYSDFLDYWGQGTLVTVSS

SEQ ID NO: 79 - DNA, 358 bp, Homo Sapien
gaggtgcagctggtggactctgggggaggcttggtccagcctggggggtccctgagactctcctgtgcagcctctggattcacgtttagtagctattggatgagttgggtccgccaggctccaggaaaggggctggagtgggtggccaacataaaagaagatggaagtgagaaatactatgtagactctttgaagggccgattcaccatctccagagacaacgccaagaactcactgtatctgcaaatgaacagcctgagagccgaggacacgtctgtgtattactgtgcgagagttcgactctacagtgacttccttgactactggggccagggaaccctggtcaccgtctcctcag

SEQ ID NO: 80 - protein, 449 aa, Homo Sapien
EVQLVDSGGGLVQPGGSLRLSCAASGFTFSSYWMSWVRQAPGKGLEWVANIKEDGSEKYYVDSLKGRFTISRDNAKNSLYLQMNSLRAEDTSVYYCARVRLYSDFLDYWGQGTLVTVSSASTKGPSVFPLAPSSKSTSGGTAALGCLVKDYFPEPVTVSWNSGALTSGVHTFPAVLQSSGLYSLSSVVTVPSSSLGTQTYICNVNHKPSNTKVDKKVEPKSCDKTHTCPPCPAPELLGGPSVFLFPPKPKDTLMISRTPEVTCVVVDVSHEDPEVKFNWYVDGVEVHNAKTKPREEQYNSTYRVVSVLTVLHQDWLNGKEYKCKVSNKALPAPIEKTISKAKGQPREPQVYTLPPSRDELTKNQVSLTCLVKGFYPSDIAVEWESNGQPENNYKTTPPVLDSDGSFFLYSKLTVDKSRWQQGNVFSCSVMHEALHNHYTQKSLSLSPGK

SEQ ID NO: 81 - DNA, 1347 bp, Homo Sapien
gaggtgcagctggtggactctgggggaggcttggtccagcctggggggtccctgagactctcctgtgcagcctctggattcacgtttagtagctattggatgagttgggtccgccaggctccaggaaaggggctggagtgggtggccaacataaaagaagatggaagtgagaaatactatgtagactctttgaagggccgattcaccatctccagagacaacgccaagaactcactgtatctgcaaatgaacagcctgagagccgaggacacgtctgtgtattactgtgcgagagttcgactctacagtgacttccttgactactggggccagggaaccctggtcaccgtctcctcagccagcaccaagggcccctctgtgttccctctggccccttccagcaagtccacctctggcggaacagccgctctgggctgcctcgtgaaggactacttccccgagcctgtgaccgtgtcctggaactctggcgctctgaccagcggagtgcacaccttccctgctgtgctgcagtcctccggcctgtactccctgtcctccgtcgtgaccgtgccttccagctctctgggcacccagacctacatctgcaacgtgaaccacaagccctccaacaccaaggtggacaagaaggtggaacccaagtcctgcgacaagacccacacctgtcccccttgtcctgcccctgaactgctgggcggaccttccgtgttcctgttccccccaaagcccaaggacaccctgatgatctcccggacccccgaagtgacctgcgtggtggtggatgtgtcccacgaggaccctgaagtgaagttcaattggtacgtggacggcgtggaagtgcacaacgccaagaccaagcctagagaggaacagtacaactccacctaccgggtggtgtccgtgctgaccgtgctgcaccaggattggctgaacggcaaagagtacaagtgcaaggtgtccaacaaggccctgcctgcccccatcgaaaagaccatctccaaggccaagggccagccccgggaaccccaggtgtacacactgccccctagcagggacgagctgaccaagaaccaggtgtccctgacctgtctcgtgaaaggcttctacccctccgatatcgccgtggaatgggagtccaacggccagcctgagaacaactacaagaccaccccccctgtgctggactccgacggctcattcttcctgtacagcaagctgacagtggacaagtcccggtggcagcagggcaacgtgttctcctgctccgtgatgcacgaggccctgcacaaccactacacccagaagtccctgtccctgagccccggcaag

SEQ ID NO: 82 - protein, 6 aa, Homo Sapien
QGVSSW

SEQ ID NO: 83 - protein, 3 aa, Homo Sapien
GAS

SEQ ID NO: 84 - protein, 9 aa, Homo Sapien
QQANSIPFT

SEQ ID NO: 85 - protein, 11 aa, Homo Sapien
RASQGVSSWLA

SEQ ID NO: 86 - protein, 7 aa, Homo Sapien
GASSLQS

SEQ ID NO: 87 - protein, 9 aa, Homo Sapien
QQANSIPFT

SEQ ID NO: 88 - protein, 107 aa, Homo Sapien
DIQMTQSPSSVSASVGDRVTITCRASQGVSSWLAWYQQKSGKAPKLLIYGASSLQSGVPSRFSGSGSGTEFILSISSLQPEDFATYYCQQANSIPFTFGPGTKVDIK

SEQ ID NO: 89 - DNA, 322 bp, Homo Sapien
gacatccagatgacccagtctccatcttccgtgtctgcatctgtcggagacagagtcaccatcacttgtcgggcgagtcagggtgttagcagttggttagcctggtatcagcagaaatcagggaaagcccctaagctcctgatctatggtgcctccagtttgcaaagtggggtcccatcaagattcagcggcagtggatctgggacagagttcattctcagcatcagcagcctgcagcctgaagattttgcaacttactattgtcaacaggctaacagtatcccattcactttcggccctgggaccaaagtggatatcaaac

SEQ ID NO: 90 - protein, 214 aa, Homo Sapien
DIQMTQSPSSVSASVGDRVTITCRASQGVSSWLAWYQQKSGKAPKLLIYGASSLQSGVPSRFSGSGSGTEFILSISSLQPEDFATYYCQQANSIPFTFGPGTKVDIKRTVAAPSVFIFPPSDEQLKSGTASVVCLLNNFYPREAKVQWKVDNALQSGNSQESVTEQDSKDSTYSLSSTLTLSKADYEKHKVYACEVTHQGLSSPVTKSFNRGEC

SEQ ID NO: 91 - DNA, 642 bp, Homo Sapien
gacatccagatgacccagtctccatcttccgtgtctgcatctgtcggagacagagtcaccatcacttgtcgggcgagtcagggtgttagcagttggttagcctggtatcagcagaaatcagggaaagcccctaagctcctgatctatggtgcctccagtttgcaaagtggggtcccatcaagattcagcggcagtggatctgggacagagttcattctcagcatcagcagcctgcagcctgaagattttgcaacttactattgtcaacaggctaacagtatcccattcactttcggccctgggaccaaagtggatatcaaacgtacggtggccgctccctccgtgttcatcttcccaccttccgacgagcagctgaagtccggcaccgcttctgtcgtgtgcctgctgaacaacttctacccccgcgaggccaaggtgcagtggaaggtggacaacgccctgcagtccggcaactcccaggaatccgtgaccgagcaggactccaaggacagcacctactccctgtcctccaccctgaccctgtccaaggccgactacgagaagcacaaggtgtacgcctgcgaagtgacccaccagggcctgtctagccccgtgaccaagtctttcaaccggggcgagtgt

SEQ ID NO: 92 - protein, 9 aa, Homo Sapien
GGSIISSDW

SEQ ID NO: 93 - protein, 7 aa, Homo Sapien
IFHSGRT

SEQ ID NO: 94 - protein, 8 aa, Homo Sapien
ARDGSGSY

SEQ ID NO: 95 - protein, 6 aa, Homo Sapien
SSDWWN

SEQ ID NO: 96 - protein, 16 aa, Homo Sapien
EIFHSGRTNYNPSLKS

SEQ ID NO: 97 - protein, 6 aa, Homo Sapien
DGSGSY

SEQ ID NO: 98 - protein, 115 aa, Homo Sapien
QVQLQESGPGLVKPSGTLSLTCIVSGGSIISSDWWNWVRQPPGKGLEWIGEIFHSGRTNYNPSLKSRVTISIDKSKNQFSLRLSSVTAADTAVYYCARDGSGSYWGQGTLVTVSS

SEQ ID NO: 99 - DNA, 346 bp, Homo Sapien
caggtgcagctgcaggagtcgggcccaggactggtgaagccttcggggaccctgtccctcacctgcattgtctctggtggctccatcatcagtagtgactggtggaattgggtccgccagcccccagggaaggggctggagtggattggagaaatctttcatagtgggaggaccaactacaacccgtccctcaagagtcgagtcaccatatcaatagacaagtccaagaatcagttctccctgaggctgagctctgtgaccgccgcggacacggccgtgtattactgtgcgagagatggttcggggagttactggggccagggaaccctggtcaccgtctcctcag

SEQ ID NO: 100 - protein, 445 aa, Homo Sapien
QVQLQESGPGLVKPSGTLSLTCIVSGGSIISSDWWNWVRQPPGKGLEWIGEIFHSGRTNYNPSLKSRVTISIDKSKNQFSLRLSSVTAADTAVYYCARDGSGSYWGQGTLVTVSSASTKGPSVFPLAPSSKSTSGGTAALGCLVKDYFPEPVTVSWNSGALTSGVHTFPAVLQSSGLYSLSSVVTVPSSSLGTQTYICNVNHKPSNTKVDKKVEPKSCDKTHTCPPCPAPELLGGPSVFLFPPKPKDTLMISRTPEVTCVVVDVSHEDPEVKFNWYVDGVEVHNAKTKPREEQYNSTYRVVSVLTVLHQDWLNGKEYKCKVSNKALPAPIEKTISKAKGQPREPQVYTLPPSRDELTKNQVSLTCLVKGFYPSDIAVEWESNGQPENNYKTTPPVLDSDGSFFLYSKLTVDKSRWQQGNVFSCSVMHEALHNHYTQKSLSLSPGK

SEQ ID NO: 101 - DNA, 1335 bp, Homo Sapien
caggtgcagctgcaggagtcgggcccaggactggtgaagccttcggggaccctgtccctcacctgcattgtctctggtggctccatcatcagtagtgactggtggaattgggtccgccagcccccagggaaggggctggagtggattggagaaatctttcatagtgggaggaccaactacaacccgtccctcaagagtcgagtcaccatatcaatagacaagtccaagaatcagttctccctgaggctgagctctgtgaccgccgcggacacggccgtgtattactgtgcgagagatggttcggggagttactggggccagggaaccctggtcaccgtctcctcagccagcaccaagggcccctctgtgttccctctggccccttccagcaagtccacctctggcggaacagccgctctgggctgcctcgtgaaggactacttccccgagcctgtgaccgtgtcctggaactctggcgctctgaccagcggagtgcacaccttccctgctgtgctgcagtcctccggcctgtactccctgtcctccgtcgtgaccgtgccttccagctctctgggcacccagacctacatctgcaacgtgaaccacaagccctccaacaccaaggtggacaagaaggtggaacccaagtcctgcgacaagacccacacctgtcccccttgtcctgcccctgaactgctgggcggaccttccgtgttcctgttccccccaaagcccaaggacaccctgatgatctcccggacccccgaagtgacctgcgtggtggtggatgtgtcccacgaggaccctgaagtgaagttcaattggtacgtggacggcgtggaagtgcacaacgccaagaccaagcctagagaggaacagtacaactccacctaccgggtggtgtccgtgctgaccgtgctgcaccaggattggctgaacggcaaagagtacaagtgcaaggtgtccaacaaggccctgcctgcccccatcgaaaagaccatctccaaggccaagggccagccccgggaaccccaggtgtacacactgccccctagcagggacgagctgaccaagaaccaggtgtccctgacctgtctcgtgaaaggcttctacccctccgatatcgccgtggaatgggagtccaacggccagcctgagaacaactacaagaccaccccccctgtgctggactccgacggctcattcttcctgtacagcaagctgacagtggacaagtcccggtggcagcagggcaacgtgttctcctgctccgtgatgcacgaggccctgcacaaccactacacccagaagtccctgtccctgagccccggcaag

SEQ ID NO: 102 - protein, 12 aa, Homo Sapien
QSVLYSSNNKNY

SEQ ID NO: 103 - protein, 3 aa, Homo Sapien
WAS

SEQ ID NO: 104 - protein, 8 aa, Homo Sapien
QQYYSNRS

SEQ ID NO: 105 - protein, 17 aa, Homo Sapien
KSSQSVLYSSNNKNYLA

SEQ ID NO: 106 - protein, 7 aa, Homo Sapien
WASTRES

SEQ ID NO: 107 - protein, 8 aa, Homo Sapien
QQYYSNRS

SEQ ID NO: 108 - protein, 112 aa, Homo Sapien
DIVMTQSPDSLAVSLGERATINCKSSQSVLYSSNNKNYLAWYQQKSGQPPKLLIYWASTRESGVPDRFSGSGSGTDFTLTISSLQTEDVAVYYCQQYYSNRSFGQGTKLEIK

SEQ ID NO: 109 - DNA, 337 bp, Homo Sapien
gacatcgtgatgacccagtctccagactccctggctgtgtctctgggcgagagggccaccatcaactgcaagtccagccagagtgttttatacagctccaacaataagaattacttagcttggtaccagcagaaatcaggacagcctcctaagttgctcatttactgggcatctacccgggaatccggggtccctgaccgattcagtggcagcgggtctgggacagatttcactctcaccatcagcagcctgcagactgaagatgtggcagtttattactgtcagcaatattatagtaatcgcagttttggccaggggaccaagctggagatcaaac

SEQ ID NO: 110 - protein, 219 aa, Homo Sapien
DIVMTQSPDSLAVSLGERATINCKSSQSVLYSSNNKNYLAWYQQKSGQPPKLLIYWASTRESGVPDRFSGSGSGTDFTLTISSLQTEDVAVYYCQQYYSNRSFGQGTKLEIKRTVAAPSVFIFPPSDEQLKSGTASVVCLLNNFYPREAKVQWKVDNALQSGNSQESVTEQDSKDSTYSLSSTLTLSKADYEKHKVYACEVTHQGLSSPVTKSFNRGEC

SEQ ID NO: 111 - DNA, 657 bp, Homo Sapien
gacatcgtgatgacccagtctccagactccctggctgtgtctctgggcgagagggccaccatcaactgcaagtccagccagagtgttttatacagctccaacaataagaattacttagcttggtaccagcagaaatcaggacagcctcctaagttgctcatttactgggcatctacccgggaatccggggtccctgaccgattcagtggcagcgggtctgggacagatttcactctcaccatcagcagcctgcagactgaagatgtggcagtttattactgtcagcaatattatagtaatcgcagttttggccaggggaccaagctggagatcaaacgtacggtggccgctccctccgtgttcatcttcccaccttccgacgagcagctgaagtccggcaccgcttctgtcgtgtgcctgctgaacaacttctacccccgcgaggccaaggtgcagtggaaggtggacaacgccctgcagtccggcaactcccaggaatccgtgaccgagcaggactccaaggacagcacctactccctgtcctccaccctgaccctgtccaaggccgactacgagaagcacaaggtgtacgcctgcgaagtgacccaccagggcctgtctagccccgtgaccaagtctttcaaccggggcgagtgt

SEQ ID NO: 112 - protein, 8 aa, Homo Sapien
GFTFSSYW

SEQ ID NO: 113 - protein, 8 aa, Homo Sapien
IKEDGSEK

SEQ ID NO: 114 - protein, 12 aa, Homo Sapien
ARNRLYSDFLDN

SEQ ID NO: 115 - protein, 5 aa, Homo Sapien
SYWMS

SEQ ID NO: 116 - protein, 17 aa, Homo Sapien
NIKEDGSEKYYVDSVKG

SEQ ID NO: 117 - protein, 10 aa, Homo Sapien
NRLYSDFLDN

SEQ ID NO: 118 - protein, 119 aa, Homo Sapien; identical to SEQ ID NO: 58

SEQ ID NO: 119 - DNA, 358 bp, Homo Sapien; identical to SEQ ID NO: 59

SEQ ID NO: 120 - protein, 449 aa, Homo Sapien; identical to SEQ ID NO: 60

SEQ ID NO: 121 - DNA, 1347 bp, Homo Sapien; identical to SEQ ID NO: 61

SEQ ID NO: 122 - protein, 6 aa, Homo Sapien
QGVSSW

SEQ ID NO: 123 - protein, 3 aa, Homo Sapien
GAS

SEQ ID NO: 124 - protein, 9 aa, Homo Sapien
QQANSIPFT

SEQ ID NO: 125 - protein, 11 aa, Homo Sapien
RASQGVSSWLA

SEQ ID NO: 126 - protein, 7 aa, Homo Sapien
GASSLQS

SEQ ID NO: 127 - protein, 9 aa, Homo Sapien
QQANSIPFT

SEQ ID NO: 128 - protein, 107 aa, Homo Sapien; identical to SEQ ID NO: 68

SEQ ID NO: 129 - DNA, 322 bp, Homo Sapien; identical to SEQ ID NO: 69

SEQ ID NO: 130 - protein, 214 aa, Homo Sapien; identical to SEQ ID NO: 70

SEQ ID NO: 131 - DNA, 642 bp, Homo Sapien; identical to SEQ ID NO: 71

SEQ ID NO: 132 - protein, 8 aa, Homo Sapien
GFTFRIYG

SEQ ID NO: 133 - protein, 8 aa, Homo Sapien
IWYDGSNK

SEQ ID NO: 134 - protein, 11 aa, Homo Sapien
ARDMDYFGMDV

SEQ ID NO: 135 - protein, 5 aa, Homo Sapien
IYGMH

SEQ ID NO: 136 - protein, 17 aa, Homo Sapien
VIWYDGSNKYYADSVKG

SEQ ID NO: 137 - protein, 9 aa, Homo Sapien
DMDYFGMDV

SEQ ID NO: 138 - protein, 118 aa, Homo Sapien
QVQLVESGGGVVQPGRSLRLSCAASGFTFRIYGMHWVRQAPGKGLEWVAVIWYDGSNKYYADSVKGRFTISRDNSDNTLYLQMNSLRAEDTAVYYCARDMDYFGMDVWGQGTTVTVSS

SEQ ID NO: 139 - DNA, 355 bp, Homo Sapien
caggtgcagctggtggagtctgggggaggcgtggtccagcctgggaggtccctgagactctcctgtgcagcgtctggattcaccttccgtatttatggcatgcactgggtccgccaggctccaggcaaggggctggagtgggtggcagttatatggtatgatggaagtaataaatactatgctgactccgtgaagggccgattcaccatctccagagacaattccgacaacacgctgtatctgcaaatgaacagcctgagagccgaggacacggctgtgtattactgtgcgagagatatggactacttcggtatggacgtctggggccaagggaccacggtcaccgtctcctcag

SEQ ID NO: 140 - protein, 448 aa, Homo Sapien
QVQLVESGGGVVQPGRSLRLSCAASGFTFRIYGMHWVRQAPGKGLEWVAVIWYDGSNKYYADSVKGRFTISRDNSDNTLYLQMNSLRAEDTAVYYCARDMDYFGMDVWGQGTTVTVSSASTKGPSVFPLAPSSKSTSGGTAALGCLVKDYFPEPVTVSWNSGALTSGVHTFPAVLQSSGLYSLSSVVTVPSSSLGTQTYICNVNHKPSNTKVDKKVEPKSCDKTHTCPPCPAPELLGGPSVFLFPPKPKDTLMISRTPEVTCVVVDVSHEDPEVKFNWYVDGVEVHNAKTKPREEQYNSTYRVVSVLTVLHQDWLNGKEYKCKVSNKALPAPIEKTISKAKGQPREPQVYTLPPSRDELTKNQVSLTCLVKGFYPSDIAVEWESNGQPENNYKTTPPVLDSDGSFFLYSKLTVDKSRWQQGNVFSCSVMHEALHNHYTQKSLSLSPGK

SEQ ID NO: 141 - DNA, 1344 bp, Homo Sapien
caggtgcagctggtggagtctgggggaggcgtggtccagcctgggaggtccctgagactctcctgtgcagcgtctggattcaccttccgtatttatggcatgcactgggtccgccaggctccaggcaaggggctggagtgggtggcagttatatggtatgatggaagtaataaatactatgctgactccgtgaagggccgattcaccatctccagagacaattccgacaacacgctgtatctgcaaatgaacagcctgagagccgaggacacggctgtgtattactgtgcgagagatatggactacttcggtatggacgtctggggccaagggaccacggtcaccgtctcctcagccagcaccaagggcccctctgtgttccctctggccccttccagcaagtccacctctggcggaacagccgctctgggctgcctcgtgaaggactacttccccgagcctgtgaccgtgtcctggaactctggcgctctgaccagcggagtgcacaccttccctgctgtgctgcagtcctccggcctgtactccctgtcctccgtcgtgaccgtgccttccagctctctgggcacccagacctacatctgcaacgtgaaccacaagccctccaacaccaaggtggacaagaaggtggaacccaagtcctgcgacaagacccacacctgtcccccttgtcctgcccctgaactgctgggcggaccttccgtgttcctgttccccccaaagcccaaggacaccctgatgatctcccggacccccgaagtgacctgcgtggtggtggatgtgtcccacgaggaccctgaagtgaagttcaattggtacgtggacggcgtggaagtgcacaacgccaagaccaagcctagagaggaacagtacaactccacctaccgggtggtgtccgtgctgaccgtgctgcaccaggattggctgaacggcaaagagtacaagtgcaaggtgtccaacaaggccctgcctgcccccatcgaaaagaccatctccaaggccaagggccagccccgggaaccccaggtgtacacactgccccctagcagggacgagctgaccaagaaccaggtgtccctgacctgtctcgtgaaaggcttctacccctccgatatcgccgtggaatgggagtccaacggccagcctgagaacaactacaagaccaccccccctgtgctggactccgacggctcattcttcctgtacagcaagctgacagtggacaagtcccggtggcagcagggcaacgtgttctcctgctccgtgatgcacgaggccctgcacaaccactacacccagaagtccctgtccctgagccccggcaag

SEQ ID NO: 142 - protein, 6 aa, Homo Sapien
QGIRND

SEQ ID NO: 143 - protein, 3 aa, Homo Sapien
AAS

SEQ ID NO: 144 - protein, 9 aa, Homo Sapien
LQHNSYPRT

SEQ ID NO: 145 - protein, 11 aa, Homo Sapien
RASQGIRNDLG

SEQ ID NO: 146 - protein, 7 aa, Homo Sapien
AASSLQS

SEQ ID NO: 147 - protein, 9 aa, Homo Sapien
LQHNSYPRT

SEQ ID NO: 148 - protein, 107 aa, Homo Sapien
DLQMTQSPSSLSASVGDRVTITCRASQGIRNDLGWYQQKPGKAPKRLIYAASSLQSGVPSRFSGSGSGTEFTLTISSLQPEDFATYYCLQHNSYPRTFGQGTKVEIK

SEQ ID NO: 149 - DNA, 322 bp, Homo Sapien
gacctccagatgacccagtctccatcctccctgtctgcatctgtaggagacagagtcaccatcacttgccgggcaagtcagggcattagaaatgatttaggctggtatcagcagaaaccagggaaagcccctaagcgcctgatctatgctgcatccagtttgcaaagtggggtcccatcaaggttcagcggcagtggatctgggacagaattcactctcacaatcagcagcctgcagcctgaagattttgcaacttattactgtctacagcataatagttaccctcggacgttcggccaagggaccaaggtggaaatcaaac

SEQ ID NO: 150 - protein, 214 aa, Homo Sapien
DLQMTQSPSSLSASVGDRVTITCRASQGIRNDLGWYQQKPGKAPKRLIYAASSLQSGVPSRFSGSGSGTEFTLTISSLQPEDFATYYCLQHNSYPRTFGQGTKVEIKRTVAAPSVFIFPPSDEQLKSGTASVVCLLNNFYPREAKVQWKVDNALQSGNSQESVTEQDSKDSTYSLSSTLTLSKADYEKHKVYACEVTHQGLSSPVTKSFNRGEC

SEQ ID NO: 151 - DNA, 642 bp, Homo Sapien
gacctccagatgacccagtctccatcctccctgtctgcatctgtaggagacagagtcaccatcacttgccgggcaagtcagggcattagaaatgatttaggctggtatcagcagaaaccagggaaagcccctaagcgcctgatctatgctgcatccagtttgcaaagtggggtcccatcaaggttcagcggcagtggatctgggacagaattcactctcacaatcagcagcctgcagcctgaagattttgcaacttattactgtctacagcataatagttaccctcggacgttcggccaagggaccaaggtggaaatcaaacgtacggtggccgctccctccgtgttcatcttcccaccttccgacgagcagctgaagtccggcaccgcttctgtcgtgtgcctgctgaacaacttctacccccgcgaggccaaggtgcagtggaaggtggacaacgccctgcagtccggcaactcccaggaatccgtgaccgagcaggactccaaggacagcacctactccctgtcctccaccctgaccctgtccaaggccgactacgagaagcacaaggtgtacgcctgcgaagtgacccaccagggcctgtctagccccgtgaccaagtctttcaaccggggcgagtgt

SEQ ID NO: 152 - protein, 9 aa, Homo Sapien
GGSISSSDW

SEQ ID NO: 153 - protein, 7 aa, Homo Sapien
IFHSGNT

SEQ ID NO: 154 - protein, 8 aa, Homo Sapien
VRDGSGSY

SEQ ID NO: 155 - protein, 6 aa, Homo Sapien
SSDWWS

SEQ ID NO: 156 - protein, 16 aa, Homo Sapien
EIFHSGNTNYNPSLKS

SEQ ID NO: 157 - protein, 6 aa, Homo Sapien
DGSGSY

SEQ ID NO: 158 - protein, 115 aa, Homo Sapien
QVQLQESGPGLVKPSGTLSLTCAVSGGSISSSDWWSWVRQPPGKGLEWIGEIFHSGNTNYNPSLKSRVTISVDKSKNQISLRLNSVTAADTAVYYCVRDGSGSYWGQGTLVTVSS

SEQ ID NO: 159 - DNA, 346 bp, Homo Sapien
caggtgcagctgcaggagtcgggcccaggactggtgaagccttcggggaccctgtccctcacctgcgctgtctctggtggctccatcagcagtagtgactggtggagttgggtccgccagcccccagggaaggggctggagtggattggggaaatctttcatagtgggaacaccaactacaacccgtccctcaagagtcgagtcaccatatcagtagacaagtccaagaaccagatctccctgaggctgaactctgtgaccgccgcggacacggccgtgtattactgtgtgagagatggttcggggagttactggggccagggaaccctggtcaccgtctcctcag

SEQ ID NO: 160 - protein, 445 aa, Homo Sapien
QVQLQESGPGLVKPSGTLSLTCAVSGGSISSSDWWSWVRQPPGKGLEWIGEIFHSGNTNYNPSLKSRVTISVDKSKNQISLRLNSVTAADTAVYYCVRDGSGSYWGQGTLVTVSSASTKGPSVFPLAPSSKSTSGGTAALGCLVKDYFPEPVTVSWNSGALTSGVHTFPAVLQSSGLYSLSSVVTVPSSSLGTQTYICNVNHKPSNTKVDKKVEPKSCDKTHTCPPCPAPELLGGPSVFLFPPKPKDTLMISRTPEVTCVVVDVSHEDPEVKFNWYVDGVEVHNAKTKPREEQYNSTYRVVSVLTVLHQDWLNGKEYKCKVSNKALPAPIEKTISKAKGQPREPQVYTLPPSRDELTKNQVSLTCLVKGFYPSDIAVEWESNGQPENNYKTTPPVLDSDGSFFLYSKLTVDKSRWQQGNVFSCSVMHEALHNHYTQKSLSLSPGK

SEQ ID NO: 161 - DNA, 1335 bp, Homo Sapien
caggtgcagctgcaggagtcgggcccaggactggtgaagccttcggggaccctgtccctcacctgcgctgtctctggtggctccatcagcagtagtgactggtggagttgggtccgccagcccccagggaaggggctggagtggattggggaaatctttcatagtgggaacaccaactacaacccgtccctcaagagtcgagtcaccatatcagtagacaagtccaagaaccagatctccctgaggctgaactctgtgaccgccgcggacacggccgtgtattactgtgtgagagatggttcggggagttactggggccagggaaccctggtcaccgtctcctcagccagcaccaagggcccctctgtgttccctctggccccttccagcaagtccacctctggcggaacagccgctctgggctgcctcgtgaaggactacttccccgagcctgtgaccgtgtcctggaactctggcgctctgaccagcggagtgcacaccttccctgctgtgctgcagtcctccggcctgtactccctgtcctccgtcgtgaccgtgccttccagctctctgggcacccagacctacatctgcaacgtgaaccacaagccctccaacaccaaggtggacaagaaggtggaacccaagtcctgcgacaagacccacacctgtcccccttgtcctgcccctgaactgctgggcggaccttccgtgttcctgttccccccaaagcccaaggacaccctgatgatctcccggacccccgaagtgacctgcgtggtggtggatgtgtcccacgaggaccctgaagtgaagttcaattggtacgtggacggcgtggaagtgcacaacgccaagaccaagcctagagaggaacagtacaactccacctaccgggtggtgtccgtgctgaccgtgctgcaccaggattggctgaacggcaaagagtacaagtgcaaggtgtccaacaaggccctgcctgcccccatcgaaaagaccatctccaaggccaagggccagccccgggaaccccaggtgtacacactgccccctagcagggacgagctgaccaagaaccaggtgtccctgacctgtctcgtgaaaggcttctacccctccgatatcgccgtggaatgggagtccaacggccagcctgagaacaactacaagaccaccccccctgtgctggactccgacggctcattcttcctgtacagcaagctgacagtggacaagtcccggtggcagcagggcaacgtgttctcctgctccgtgatgcacgaggccctgcacaaccactacacccagaagtccctgtccctgagccccggcaag

SEQ ID NO: 162 - protein, 12 aa, Homo Sapien
QSVLYSSNNKNY

SEQ ID NO: 163 - protein, 3 aa, Homo Sapien
WAS

SEQ ID NO: 164 - protein, 8 aa, Homo Sapien
QQYYSTRS

SEQ ID NO: 165 - protein, 17 aa, Homo Sapien
KSSQSVLYSSNNKNYLA

SEQ ID NO: 166 - protein, 7 aa, Homo Sapien
WASTRES

SEQ ID NO: 167 - protein, 8 aa, Homo Sapien
QQYYSTRS

SEQ ID NO: 168 - protein, 112 aa, Homo Sapien
DIVMTQSPDSLAVSLGERATINCKSSQSVLYSSNNKNYLAWYQQKPGQPPKLLIYWASTRESGVPDRFSGSGSGTDFTLTISSLQAEDVAVYYCQQYYSTRSFGQGTKLEIK

SEQ ID NO: 169 - DNA, 337 bp, Homo Sapien
gacatcgtgatgacccagtctccagactccctggctgtgtctctgggcgagagggccaccatcaactgcaagtccagccagagtgttttatacagctccaacaataagaactacttagcttggtaccagcagaaaccaggacagcctcctaaactgctcatttactgggcatctacccgggaatccggggtccctgaccgattcagtggcagcgggtctgggacagatttcactctcaccatcagcagcctgcaggctgaagatgtggcagtttattactgtcagcaatattatagtactcgcagttttggccaggggaccaagctggagatcaaac

SEQ ID NO: 170 - protein, 219 aa, Homo Sapien
DIVMTQSPDSLAVSLGERATINCKSSQSVLYSSNNKNYLAWYQQKPGQPPKLLIYWASTRESGVPDRFSGSGSGTDFTLTISSLQAEDVAVYYCQQYYSTRSFGQGTKLEIKRTVAAPSVFIFPPSDEQLKSGTASVVCLLNNFYPREAKVQWKVDNALQSGNSQESVTEQDSKDSTYSLSSTLTLSKADYEKHKVYACEVTHQGLSSPVTKSFNRGEC

SEQ ID NO: 171 - DNA, 657 bp, Homo Sapien
gacatcgtgatgacccagtctccagactccctggctgtgtctctgggcgagagggccaccatcaactgcaagtccagccagagtgttttatacagctccaacaataagaactacttagcttggtaccagcagaaaccaggacagcctcctaaactgctcatttactgggcatctacccgggaatccggggtccctgaccgattcagtggcagcgggtctgggacagatttcactctcaccatcagcagcctgcaggctgaagatgtggcagtttattactgtcagcaatattatagtactcgcagttttggccaggggaccaagctggagatcaaacgtacggtggccgctccctccgtgttcatcttcccaccttccgacgagcagctgaagtccggcaccgcttctgtcgtgtgcctgctgaacaacttctacccccgcgaggccaaggtgcagtggaaggtggacaacgccctgcagtccggcaactcccaggaatccgtgaccgagcaggactccaaggacagcacctactccctgtcctccaccctgaccctgtccaaggccgactacgagaagcacaaggtgtacgcctgcgaagtgacccaccagggcctgtctagccccgtgaccaagtctttcaaccggggcgagtgt

SEQ ID NO: 172 - protein, 10 aa, Homo Sapien
GGSISSSSYY

SEQ ID NO: 173 - protein, 7 aa, Homo Sapien
IYSTGYT

SEQ ID NO: 174 - protein, 13 aa, Homo Sapien
AISTAAGPEYFHR

SEQ ID NO: 175 - protein, 7 aa, Homo Sapien
SSSYYCG

SEQ ID NO: 176 - protein, 16 aa, Homo Sapien
SIYSTGYTYYNPSLKS

SEQ ID NO: 177 - protein, 11 aa, Homo Sapien
STAAGPEYFHR

SEQ ID NO: 178 - protein, 120 aa, Homo Sapien
QLQESGPGLVKPSETLSLTCTVSGGSISSSSYYCGWIRQPPGKGLDWIGSIYSTGYTYYNPSLKSRVTISIDTSKNQFSCLILTSVTAADTAVYYCAISTAAGPEYFHRWGQGTLVTVSS

SEQ ID NO: 179 - DNA, 361 bp, Homo Sapien
cagctgcaggagtcgggcccaggcctggtgaagccttcggagaccctgtccctcacctgcactgtctctggtggctccatcagcagtagtagttattactgcggctggatccgccagccccctgggaaggggctggactggattgggagtatctattctactgggtacacctactacaacccgtccctcaagagtcgagtcaccatttccatagacacgtccaagaaccagttctcatgcctgatactgacctctgtgaccgccgcagacacggctgtgtattactgtgcgataagtacagcagctggccctgaatacttccatcgctggggccagggcaccctggtcaccgtctcctcag

SEQ ID NO: 180 - protein, 450 aa, Homo Sapien
QLQESGPGLVKPSETLSLTCTVSGGSISSSSYYCGWIRQPPGKGLDWIGSIYSTGYTYYNPSLKSRVTISIDTSKNQFSCLILTSVTAADTAVYYCAISTAAGPEYFHRWGQGTLVTVSSASTKGPSVFPLAPSSKSTSGGTAALGCLVKDYFPEPVTVSWNSGALTSGVHTFPAVLQSSGLYSLSSVVTVPSSSLGTQTYICNVNHKPSNTKVDKKVEPKSCDKTHTCPPCPAPELLGGPSVFLFPPKPKDTLMISRTPEVTCVVVDVSHEDPEVKFNWYVDGVEVHNAKTKPREEQYNSTYRVVSVLTVLHQDWLNGKEYKCKVSNKALPAPIEKTISKAKGQPREPQVYTLPPSRDELTKNQVSLTCLVKGFYPSDIAVEWESNGQPENNYKTTPPVLDSDGSFFLYSKLTVDKSRWQQGNVFSCSVMHEALHNHYTQKSLSLSPGK

SEQ ID NO: 181 - DNA, 1350 bp, Homo Sapien
cagctgcaggagtcgggcccaggcctggtgaagccttcggagaccctgtccctcacctgcactgtctctggtggctccatcagcagtagtagttattactgcggctggatccgccagccccctgggaaggggctggactggattgggagtatctattctactgggtacacctactacaacccgtccctcaagagtcgagtcaccatttccatagacacgtccaagaaccagttctcatgcctgatactgacctctgtgaccgccgcagacacggctgtgtattactgtgcgataagtacagcagctggccctgaatacttccatcgctggggccagggcaccctggtcaccgtctcctcagccagcaccaagggcccctctgtgttccctctggccccttccagcaagtccacctctggcggaacagccgctctgggctgcctcgtgaaggactacttccccgagcctgtgaccgtgtcctggaactctggcgctctgaccagcggagtgcacaccttccctgctgtgctgcagtcctccggcctgtactccctgtcctccgtcgtgaccgtgccttccagctctctgggcacccagacctacatctgcaacgtgaaccacaagccctccaacaccaaggtggacaagaaggtggaacccaagtcctgcgacaagacccacacctgtcccccttgtcctgcccctgaactgctgggcggaccttccgtgttcctgttccccccaaagcccaaggacaccctgatgatctcccggacccccgaagtgacctgcgtggtggtggatgtgtcccacgaggaccctgaagtgaagttcaattggtacgtggacggcgtggaagtgcacaacgccaagaccaagcctagagaggaacagtacaactccacctaccgggtggtgtccgtgctgaccgtgctgcaccaggattggctgaacggcaaagagtacaagtgcaaggtgtccaacaaggccctgcctgcccccatcgaaaagaccatctccaaggccaagggccagccccgggaaccccaggtgtacacactgccccctagcagggacgagctgaccaagaaccaggtgtccctgacctgtctcgtgaaaggcttctacccctccgatatcgccgtggaatgggagtccaacggccagcctgagaacaactacaagaccaccccccctgtgctggactccgacggctcattcttcctgtacagcaagctgacagtggacaagtcccggtggcagcagggcaacgtgttctcctgctccgtgatgcacgaggccctgcacaaccactacacccagaagtccctgtccctgagccccggcaag

SEQ ID NO: 182 - protein, 12 aa, Homo Sapien
QSVLYSSNSKNF

SEQ ID NO: 183 - protein, 3 aa, Homo Sapien
WAS

SEQ ID NO: 184 - protein, 9 aa, Homo Sapien
QQYYSTPRT

SEQ ID NO: 185 - protein, 17 aa, Homo Sapien
KSSQSVLYSSNSKNFLA

SEQ ID NO: 186 - protein, 7 aa, Homo Sapien
WASTRGS

SEQ ID NO: 187 - protein, 9 aa, Homo Sapien
QQYYSTPRT

SEQ ID NO: 188 - protein, 113 aa, Homo Sapien
DIVMTQSPDSLAVSLGERATINCKSSQSVLYSSNSKNFLAWYQQKPGQPPKLFIYWASTRGSGVPDRISGSGSGTDFNLTISSLQAEDVAVYYCQQYYSTPRTFGQGTKVEIK

SEQ ID NO: 189 - DNA, 340 bp, Homo Sapien
gacatcgtgatgacccagtctccagactccctggctgtgtctctgggcgagagggccaccatcaactgcaagtccagccagagtgttttatacagctccaacagtaagaacttcttagcttggtaccagcagaaaccgggacagcctcctaagctgttcatttactgggcatctacccggggatccggggtccctgaccgaatcagtggcagcgggtctgggacagatttcaatctcaccatcagcagcctgcaggctgaagatgtggcagtttattactgtcaacaatattatagtactcctcggacgttcggccaagggaccaaggtggagatcaaac

SEQ ID NO: 190 - protein, 220 aa, Homo Sapien
DIVMTQSPDSLAVSLGERATINCKSSQSVLYSSNSKNFLAWYQQKPGQPPKLFIYWASTRGSGVPDRISGSGSGTDFNLTISSLQAEDVAVYYCQQYYSTPRTFGQGTKVEIKRTVAAPSVFIFPPSDEQLKSGTASVVCLLNNFYPREAKVQWKVDNALQSGNSQESVTEQDSKDSTYSLSSTLTLSKADYEKHKVYACEVTHQGLSSPVTKSFNRGEC

SEQ ID NO: 191 - DNA, 660 bp, Homo Sapien
gacatcgtgatgacccagtctccagactccctggctgtgtctctgggcgagagggccaccatcaactgcaagtccagccagagtgttttatacagctccaacagtaagaacttcttagcttggtaccagcagaaaccgggacagcctcctaagctgttcatttactgggcatctacccggggatccggggtccctgaccgaatcagtggcagcgggtctgggacagatttcaatctcaccatcagcagcctgcaggctgaagatgtggcagtttattactgtcaacaatattatagtactcctcggacgttcggccaagggaccaaggtggagatcaaacgtacggtggccgctccctccgtgttcatcttcccaccttccgacgagcagctgaagtccggcaccgcttctgtcgtgtgcctgctgaacaacttctacccccgcgaggccaaggtgcagtggaaggtggacaacgccctgcagtccggcaactcccaggaatccgtgaccgagcaggactccaaggacagcacctactccctgtcctccaccctgaccctgtccaaggccgactacgagaagcacaaggtgtacgcctgcgaagtgacccaccagggcctgtctagccccgtgaccaagtctttcaaccggggcgagtgt

SEQ ID NO: 192 - DNA, 981 bp, Homo Sapien
gcttccaccaagggcccatccgtcttccccctggcgccctgctccaggagcacctccgagagcacagccgccctgggctgcctggtcaaggactacttccccgaaccggtgacggtgtcgtggaactcaggcgccctgaccagcggcgtgcacaccttcccggctgtcctacagtcctcaggactctactccctcagcagcgtggtgaccgtgccctccagcagcttgggcacgaagacctacacctgcaacgtagatcacaagcccagcaacaccaaggtggacaagagagttgagtccaaatatggtcccccatgcccatcatgcccagcacctgagttcctggggggaccatcagtcttcctgttccccccaaaacccaaggacactctcatgatctcccggacccctgaggtcacgtgcgtggtggtggacgtgagccaggaagaccccgaggtccagttcaactggtacgtggatggcgtggaggtgcataatgccaagacaaagccgcgggaggagcagttcaacagcacgtaccgtgtggtcagcgtcctcaccgtcctgcaccaggactggctgaacggcaaggagtacaagtgcaaggtctccaacaaaggcctcccgtcctccatcgagaaaaccatctccaaagccaaagggcagccccgagagccacaggtgtacaccctgcccccatcccaggaggagatgaccaagaaccaggtcagcctgacctgcctggtcaaaggcttctaccccagcgacatcgccgtggagtgggagagcaatgggcagccggagaacaactacaagaccacgcctcccgtgctggactccgacggctccttcttcctctacagcaggctaaccgtggacaagagcaggtggcaggaggggaatgtcttctcatgctccgtgatgcatgaggctctgcacaaccactacacacagaagagcctctccctgtctctgggtaaa

SEQ ID NO: 193 - protein, 327 aa, Homo Sapien
ASTKGPSVFPLAPCSRSTSESTAALGCLVKDYFPEPVTVSWNSGALTSGVHTFPAVLQSSGLYSLSSVVTVPSSSLGTKTYTCNVDHKPSNTKVDKRVESKYGPPCPSCPAPEFLGGPSVFLFPPKPKDTLMISRTPEVTCVVVDVSQEDPEVQFNWYVDGVEVHNAKTKPREEQFNSTYRVVSVLTVLHQDWLNGKEYKCKVSNKGLPSSIEKTISKAKGQPREPQVYTLPPSQEEMTKNQVSLTCLVKGFYPSDIAVEWESNGQPENNYKTTPPVLDSDGSFFLYSRLTVDKSRWQEGNVFSCSVMHEALHNHYTQKSLSLSLGK

SEQ ID NO: 194 - DNA, 981 bp, Homo Sapien
gcttccaccaagggcccatccgtcttccccctggcgccctgctccaggagcacctccgagagcacagccgccctgggctgcctggtcaaggactacttccccgaaccggtgacggtgtcgtggaactcaggcgccctgaccagcggcgtgcacaccttcccggctgtcctacagtcctcaggactctactccctcagcagcgtggtgaccgtgccctccagcagcttgggcacgaagacctacacctgcaacgtagatcacaagcccagcaacaccaaggtggacaagagagttgagtccaaatatggtcccccgtgcccatcatgcccagcacctgagttcctggggggaccatcagtcttcctgttccccccaaaacccaaggacactctcatgatctcccggacccctgaggtcacgtgcgtggtggtggacgtgagccaggaagaccccgaggtccagttcaactggtacgtggatggcgtggaggtgcataatgccaagacaaagccgcgggaggagcagttcaacagcacgtaccgtgtggtcagcgtcctcaccgtcgtgcaccaggactggctgaacggcaaggagtacaagtgcaaggtctccaacaaaggcctcccgtcctccatcgagaaaaccatctccaaagccaaagggcagccccgagagccacaggtgtacaccctgcccccatcccaggaggagatgaccaagaaccaggtcagcctgacctgcctggtcaaaggcttctaccccagcgacatcgccgtggagtgggagagcaatgggcagccggagaacaactacaagaccacgcctcccgtgctggactccgacggctccttcttcctctacagcaggctaaccgtggacaagagcaggtggcaggaggggaatgtcttctcatgctccgtgatgcatgaggctctgcacaaccactacacgcagaagagcctctccctgtctctgggtaaa

SEQ ID NO: 195 - protein, 327 aa, Homo Sapien
ASTKGPSVFPLAPCSRSTSESTAALGCLVKDYFPEPVTVSWNSGALTSGVHTFPAVLQSSGLYSLSSVVTVPSSSLGTKTYTCNVDHKPSNTKVDKRVESKYGPPCPSCPAPEFLGGPSVFLFPPKPKDTLMISRTPEVTCVVVDVSQEDPEVQFNWYVDGVEVHNAKTKPREEQFNSTYRVVSVLTVVHQDWLNGKEYKCKVSNKGLPSSIEKTISKAKGQPREPQVYTLPPSQEEMTKNQVSLTCLVKGFYPSDIAVEWESNGQPENNYKTTPPVLDSDGSFFLYSRLTVDKSRWQEGNVFSCSVMHEALHNHYTQKSLSLSLGK

SEQ ID NO: 196 - DNA, 981 bp, Homo Sapien
gcttccaccaagggcccatccgtcttccccctggcgccctgctccaggagcacctccgagagcacagccgccctgggctgcctggtcaaggactacttccccgaaccggtgacggtgtcgtggaactcaggcgccctgaccagcggcgtgcacaccttcccggctgtcctacagtcctcaggactctactccctcagcagcgtggtgaccgtgccctccagcagcttgggcacgaagacctacacctgcaacgtagatcacaagcccagcaacaccaaggtggacaagagagttgagtccaaatatggtcccccatgcccatcatgcccagcacctgagttcctggggggaccatcagtcttcctgttccccccaaaacccaaggacactctcatgatctcccggacccctgaggtcacgtgcgtggtggtggacgtgagccaggaagaccccgaggtccagttcaactggtacgtggatggcgtggaggtgcataatgccaagacaaagccgcgggaggagcagttcaacagcacgtaccgtgtggtcagcgtcctcaccgtcctgcaccaggactggctgaacggcaaggagtacaagtgcaaggtctccaacaaaggcctcccgtcctccatcgagaaaaccatctccaaagccaaagggcagccccgagagccacaggtgtacaccctgcccccatcccaggaggagatgaccaagaaccaggtcagcctgacctgcctggtcaaaggcttctaccccagcgacatcgccgtggagtgggagagcaatgggcagccggagaacaactacaagaccacgcctcccgtgctggactccgacggctccttcttcctctacagcaagctcaccgtggacaagagcaggtggcaggaggggaacgtcttctcatgctccgtgatgcatgaggctctgcacaaccactacacgcagaagagcctctccctgtctctgggtaaa

SEQ ID NO: 197 - protein, 327 aa, Homo Sapien
ASTKGPSVFPLAPCSRSTSESTAALGCLVKDYFPEPVTVSWNSGALTSGVHTFPAVLQSSGLYSLSSVVTVPSSSLGTKTYTCNVDHKPSNTKVDKRVESKYGPPCPSCPAPEFLGGPSVFLFPPKPKDTLMISRTPEVTCVVVDVSQEDPEVQFNWYVDGVEVHNAKTKPREEQFNSTYRVVSVLTVLHQDWLNGKEYKCKVSNKGLPSSIEKTISKAKGQPREPQVYTLPPSQEEMTKNQVSLTCLVKGFYPSDIAVEWESNGQPENNYKTTPPVLDSDGSFFLYSKLTVDKSRWQEGNVFSCSVMHEALHNHYTQKSLSLSLGK

SEQ ID NO: 198 - DNA, 981 bp, Homo Sapien
gcctccaccaagggcccatccgtcttccccctggcgccctgctccaggagcacctccgagagcacggccgccctgggctgcctggtcaaggactacttccccgaaccagtgacggtgtcgtggaactcaggcgccctgaccagcggcgtgcacaccttcccggctgtcctacagtcctcaggactctactccctcagcagcgtggtgaccgtgccctccagcagcttgggcacgaagacctacacctgcaacgtagatcacaagcccagcaacaccaaggtggacaagagagttgagtccaaatatggtcccccatgcccaccatgcccagcgcctgaatttgaggggggaccatcagtcttcctgttccccccaaaacccaaggacactctcatgatctcccggacccctgaggtcacgtgcgtggtggtggacgtgagccaggaagaccccgaggtccagttcaactggtacgtggatggcgtggaggtgcataatgccaagacaaagccgcgggaggagcagttcaacagcacgtaccgtgtggtcagcgtcctcaccgtcctgcaccaggactggctgaacggcaaggagtacaagtgcaaggtctccaacaaaggcctcccgtcatcgatcgagaaaaccatctccaaagccaaagggcagccccgagagccacaggtgtacaccctgcccccatcccaggaggagatgaccaagaaccaggtcagcctgacctgcctggtcaaaggcttctaccccagcgacatcgccgtggagtgggagagcaatgggcagccggagaacaactacaagaccacgcctcccgtgctggactccgacggatccttcttcctctacagcaggctaaccgtggacaagagcaggtggcaggaggggaatgtcttctcatgctccgtgatgcatgaggctctgcacaaccactacacacagaagagcctctccctgtctctgggtaaa

SEQ ID NO: 199 - protein, 327 aa, Homo Sapien
ASTKGPSVFPLAPCSRSTSESTAALGCLVKDYFPEPVTVSWNSGALTSGVHTFPAVLQSSGLYSLSSVVTVPSSSLGTKTYTCNVDHKPSNTKVDKRVESKYGPPCPPCPAPEFEGGPSVFLFPPKPKDTLMISRTPEVTCVVVDVSQEDPEVQFNWYVDGVEVHNAKTKPREEQFNSTYRVVSVLTVLHQDWLNGKEYKCKVSNKGLPSSIEKTISKAKGQPREPQVYTLPPSQEEMTKNQVSLTCLVKGFYPSDIAVEWESNGQPENNYKTTPPVLDSDGSFFLYSRLTVDKSRWQEGNVFSCSVMHEALHNHYTQKSLSLSLGK

SEQ ID NO: 200 - DNA, 981 bp, Homo Sapien
gcctccaccaagggacctagcgtgttccctctcgccccctgttccaggtccacaagcgagtccaccgctgccctcggctgtctggtgaaagactactttcccgagcccgtgaccgtctcctggaatagcggagccctgacctccggcgtgcacacatttcccgccgtgctgcagagcagcggactgtatagcctgagcagcgtggtgaccgtgcccagctccagcctcggcaccaaaacctacacctgcaacgtggaccacaagccctccaacaccaaggtggacaagcgggtggagagcaagtacggccccccttgccctccttgtcctgcccctgagttcgagggaggaccctccgtgttcctgtttccccccaaacccaaggacaccctgatgatctcccggacacccgaggtgacctgtgtggtcgtggacgtcagccaggaggaccccgaggtgcagttcaactggtatgtggacggcgtggaggtgcacaatgccaaaaccaagcccagggaggagcagttcaattccacctacagggtggtgagcgtgctgaccgtcctgcatcaggattggctgaacggcaaggagtacaagtgcaaggtgtccaacaagggactgcccagctccatcgagaagaccatcagcaaggctaagggccagccgagggagccccaggtgtataccctgcctcctagccaggaagagatgaccaagaaccaagtgtccctgacctgcctggtgaagggattctacccctccgacatcgccgtggagtgggagagcaatggccagcccgagaacaactacaaaacaacccctcccgtgctcgatagcgacggcagcttctttctctacagccggctgacagtggacaagagcaggtggcaggagggcaacgtgttctcctgttccgtgatgcacgaggccctgcacaatcactacacccagaagagcctctccctgtccctgggcaag

SEQ ID NO: 201 - DNA, 981 bp, Homo Sapien
gccagcaccaagggcccttccgtgttccccctggccccttgcagcaggagcacctccgaatccacagctgccctgggctgtctggtgaaggactactttcccgagcccgtgaccgtgagctggaacagcggcgctctgacatccggcgtccacacctttcctgccgtcctgcagtcctccggcctctactccctgtcctccgtggtgaccgtgcctagctcctccctcggcaccaagacctacacctgtaacgtggaccacaaaccctccaacaccaaggtggacaaacgggtcgagagcaagtacggccctccctgccctccttgtcctgcccccgagttcgaaggcggacccagcgtgttcctgttccctcctaagcccaaggacaccctcatgatcagccggacacccgaggtgacctgcgtggtggtggatgtgagccaggaggaccctgaggtccagttcaactggtatgtggatggcgtggaggtgcacaacgccaagacaaagccccgggaagagcagttcaactccacctacagggtggtcagcgtgctgaccgtgctgcatcaggactggctgaacggcaaggagtacaagtgcaaggtcagcaataagggactgcccagcagcatcgagaagaccatctccaaggctaaaggccagccccgggaacctcaggtgtacaccctgcctcccagccaggaggagatgaccaagaaccaggtgagcctgacctgcctggtgaagggattctacccttccgacatcgccgtggagtgggagtccaacggccagcccgagaacaattataagaccacccctcccgtcctcgacagcgacggatccttctttctgtactccaggctgaccgtggataagtccaggtggcaggaaggcaacgtgttcagctgctccgtgatgcacgaggccctgcacaatcactacacccagaagtccctgagcctgtccctgggaaag

SEQ ID NO: 202 - DNA, 981 bp, Homo Sapien
gcctccaccaagggcccatccgtcttccccctggcgccctgctccaggagcacctccgagagcacggccgccctgggctgcctggtcaaggactacttccccgaaccagtgacggtgtcgtggaactcaggcgccctgaccagcggcgtgcacaccttcccggctgtcctacagtcctcaggactctactccctcagcagcgtggtgaccgtgccctccagcagcttgggcacgaagacctacacctgcaacgtagatcacaagcccagcaacaccaaggtggacaagagagttgagtccaaatatggtcccccatgcccaccatgcccagcgcctccagttgcggggggaccatcagtcttcctgttccccccaaaacccaaggacactctcatgatctcccggacccctgaggtcacgtgcgtggtggtggacgtgagccaggaagaccccgaggtccagttcaactggtacgtggatggcgtggaggtgcataatgccaagacaaagccgcgggaggagcagttcaacagcacgtaccgtgtggtcagcgtcctcaccgtcctgcaccaggactggctgaacggcaaggagtacaagtgcaaggtctccaacaaaggcctcccgtcatcgatcgagaaaaccatctccaaagccaaagggcagccccgagagccacaggtgtacaccctgcccccatcccaggaggagatgaccaagaaccaggtcagcctgacctgcctggtcaaaggcttctaccccagcgacatcgccgtggagtgggagagcaatgggcagccggagaacaactacaagaccacgcctcccgtgctggactccgacggatccttcttcctctacagcaggctaaccgtggacaagagcaggtggcaggaggggaatgtcttctcatgctccgtgatgcatgaggctctgcacaaccactacacacagaagagcctctccctgtctctgggtaaa

SEQ ID NO: 203 - protein, 327 aa, Homo Sapien
ASTKGPSVFPLAPCSRSTSESTAALGCLVKDYFPEPVTVSWNSGALTSGVHTFPAVLQSSGLYSLSSVVTVPSSSLGTKTYTCNVDHKPSNTKVDKRVESKYGPPCPPCPAPPVAGGPSVFLFPPKPKDTLMISRTPEVTCVVVDVSQEDPEVQFNWYVDGVEVHNAKTKPREEQFNSTYRVVSVLTVLHQDWLNGKEYKCKVSNKGLPSSIEKTISKAKGQPREPQVYTLPPSQEEMTKNQVSLTCLVKGFYPSDIAVEWESNGQPENNYKTTPPVLDSDGSFFLYSRLTVDKSRWQEGNVFSCSVMHEALHNHYTQKSLSLSLGK

SEQ ID NO: 204 - DNA, 990 bp, Homo Sapien
gcctccaccaagggcccatcggtcttccccctggcaccctcctccaagagcacctctgggggcacagcggccctgggctgcctggtcaaggactacttccccgaaccggtgacggtgtcgtggaactcaggcgccctgaccagcggcgtgcacaccttcccggctgtcctacagtcctcaggactctactccctcagcagcgtggtgaccgtgccctccagcagcttgggcacccagacctacatctgcaacgtgaatcacaagcccagcaacaccaaggtggacaagaaagtggagcccaaatcttgtgacaaaactcacacatgcccaccgtgcccagcacctgaactcgcgggggcaccgtcagtcttcctcttccccccaaaacccaaggacaccctcatgatctcccggacccctgaggtcacatgcgtggtggtggacgtgagccacgaagaccctgaggtcaagttcaactggtacgtggacggcgtggaggtgcataatgccaagacaaagccgcgggaggagcagtacaacagcacgtaccgtgtggtcagcgtcctcaccgtcctgcaccaggactggctgaatggcaaggagtacaagtgcaaggtctccaacaaagccctcccagcccccatcgagaaaaccatctccaaagccaaagggcagccccgagaaccacaggtgtacaccctgcccccatcccgggatgagctgaccaagaaccaggtcagcctgacctgcctggtcaaaggcttctatcccagcgacatcgccgtggagtgggagagcaatgggcagccggagaacaactacaagaccacgcctcccgtgctggactccgacggctccttcttcctctacagcaagctcaccgtggacaagagcaggtggcagcaggggaacgtcttctcatgctccgtgatgcatgaggctctgcacaaccactacacgcagaagagcctctccctgtctccgggtaaa

SEQ ID NO: 205 - protein, 330 aa, Homo Sapien
ASTKGPSVFPLAPSSKSTSGGTAALGCLVKDYFPEPVTVSWNSGALTSGVHTFPAVLQSSGLYSLSSVVTVPSSSLGTQTYICNVNHKPSNTKVDKKVEPKSCDKTHTCPPCPAPELAGAPSVFLFPPKPKDTLMISRTPEVTCVVVDVSHEDPEVKFNWYVDGVEVHNAKTKPREEQYNSTYRVVSVLTVLHQDWLNGKEYKCKVSNKALPAPIEKTISKAKGQPREPQVYTLPPSRDELTKNQVSLTCLVKGFYPSDIAVEWESNGQPENNYKTTPPVLDSDGSFFLYSKLTVDKSRWQQGNVFSCSVMHEALHNHYTQKSLSLSPGK

SEQ ID NO: 206 - DNA, 321 bp, Homo Sapien
cgtacggtggccgctccctccgtgttcatcttcccaccttccgacgagcagctgaagtccggcaccgcttctgtcgtgtgcctgctgaacaacttctacccccgcgaggccaaggtgcagtggaaggtggacaacgccctgcagtccggcaactcccaggaatccgtgaccgagcaggactccaaggacagcacctactccctgtcctccaccctgaccctgtccaaggccgactacgagaagcacaaggtgtacgcctgcgaagtgacccaccagggcctgtctagccccgtgaccaagtctttcaaccggggcgagtgt

SEQ ID NO: 207 - protein, 107 aa, Homo Sapien [sequence omitted]

SEQ ID NO: 208 - DNA, 321 bp, Homo Sapien
cgaactgtggctgcaccatctgtcttcatcttcccgccatctgatgagcagttgaaatctggaactgcctctgttgtgtgcctgctgaataacttctatcccagagaggccaaagtacagtggaaggtggataacgccctccaatcgggtaactcccaggagagtgtcacagagcaggagagcaaggacagcacctacagcctcagcagcaccctgacgctgagcaaagcagactacgagaaacacaaagtctacgccggcgaagtcacccatcagggcctgagctcgcccgtcacaaagagcttcaacaggggagagtgt

SEQ ID NO: 209 - protein, 107 aa, Homo Sapien
RTVAAPSVFIFPPSDEQLKSGTASVVCLLNNFYPREAKVQWKVDNALQSGNSQESVTEQESKDSTYSLSSTLTLSKADYEKHKVYAGEVTHQGLSSPVTKSFNRGEC

SEQ ID NO: 210 - DNA, 321 bp, Homo Sapien
cgaactgtggctgcaccatctgtcttcatcttcccgccatctgatgagcagttgaaatctggaactgcctctgttgtgtgcctgctgaataacttctatcccagagaggccaaagtacagcggaaggtggataacgccctccaatcgggtaactcccaggagagtgtcacagagcaggagagcaaggacagcacctacagcctcagcagcaccctgacgctgagcaaagcagactacgagaaacacaaagtctacgcctgcgaagtcacccatcagggcctgagctcgcccgtcacaaagagcttcaacaggggagagtgt

SEQ ID NO: 211 - protein, 107 aa, Homo Sapien
RTVAAPSVFIFPPSDEQLKSGTASVVCLLNNFYPREAKVQRKVDNALQSGNSQESVTEQESKDSTYSLSSTLTLSKADYEKHKVYACEVTHQGLSSPVTKSFNRGEC

SEQ ID NO: 212 - DNA, 321 bp, Homo Sapien
cgaactgtggctgcaccatctgtcttcatcttcccgccatctgatgagcagttgaaatctggaactgcctctgttgtgtgcctgctgaataacttctatcccagagaggccaaagtacagtggaaggtggataacgccctccaatcgggtaactcccaggagagtgtcacagagcaggacagcaaggacagcacctacagcctcagcagcaccctgacgctgagcaaagcagactacgagaaacacaaactctacgcctgcgaagtcacccatcagggcctgagctcgcccgtcacaaagagcttcaacaggggagagtgt

SEQ ID NO: 213 - protein, 107 aa, Homo Sapien
RTVAAPSVFIFPPSDEQLKSGTASVVCLLNNFYPREAKVQWKVDNALQSGNSQESVTEQDSKDSTYSLSSTLTLSKADYEKHKLYACEVTHQGLSSPVTKSFNRGEC

SEQ ID NO: 214 - DNA, 321 bp, Homo Sapien
cgaactgtggctgcaccatctgtcttcatcttcccgccatctgatgagcagttgaaatctggaactgcctctgttgtgtgcctgctgaataacttctatcccagagaggccaaagtacagtggaaggtggataacgccctccaatcgggtaactcccaggagagtgtcacagagcaggacagcaaggacagcacctacagcctcagcaacaccctgacgctgagcaaagcagactacgagaaacacaaagtctacgcctgcgaagtcacccatcagggcctgagctcgcccgtcacaaagagcttcaacaggggagagtgc

SEQ ID NO: 215 - protein, 107 aa, Homo Sapien
RTVAAPSVFIFPPSDEQLKSGTASVVCLLNNFYPREAKVQWKVDNALQSGNSQESVTEQDSKDSTYSLSNTLTLSKADYEKHKVYACEVTHQGLSSPVTKSFNRGEC

SEQ ID NO: 216 - DNA, 312 bp, Homo Sapien
cccaaggccaaccccacggtcactctgttcccgccctcctctgaggagctccaagccaacaaggccacactagtgtgtctgatcagtgacttctacccgggagctgtgacagtggcttggaaggcagatggcagccccgtcaaggcgggagtggagacgaccaaaccctccaaacagagcaacaacaagtacgcggccagcagctacctgagcctgacgcccgagcagtggaagtcccacagaagctacagctgccaggtcacgcatgaagggagcaccgtggagaagacagtggcccctacagaatgttca

SEQ ID NO: 217 - protein, 104 aa, Homo Sapien
PKANPTVTLFPPSSEELQANKATLVCLISDFYPGAVTVAWKADGSPVKAGVETTKPSKQSNNKYAASSYLSLTPEQWKSHRSYSCQVTHEGSTVEKTVAPTECS

SEQ ID NO: 218 - DNA, 318 bp, Homo Sapien
ggtcagcccaaggccaaccccactgtcactctgttcccgccctcctctgaggagctccaagccaacaaggccacactagtgtgtctgatcagtgacttctacccgggagctgtgacagtggcctggaaggcagatggcagccccgtcaaggcgggagtggagaccaccaaaccctccaaacagagcaacaacaagtacgcggccagcagctacctgagcctgacgcccgagcagtggaagtcccacagaagctacagctgccaggtcacgcatgaagggagcaccgtggagaagacagtggcccctacagaatgttca

SEQ ID NO: 219 - protein, 106 aa, Homo Sapien
GQPKANPTVTLFPPSSEELQANKATLVCLISDFYPGAVTVAWKADGSPVKAGVETTKPSKQSNNKYAASSYLSLTPEQWKSHRSYSCQVTHEGSTVEKTVAPTECS

SEQ ID NO: 220 - DNA, 318 bp, Homo Sapien; identical to SEQ ID NO: 218

SEQ ID NO: 221 - DNA, 318 bp, Homo Sapien
ggccagcctaaggccgctccttctgtgaccctgttccccccatcctccgaggaactgcaggctaacaaggccaccctcgtgtgcctgatcagcgacttctaccctggcgccgtgaccgtggcctggaaggctgatagctctcctgtgaaggccggcgtggaaaccaccaccccttccaagcagtccaacaacaaatacgccgcctcctcctacctgtccctgacccctgagcagtggaagtcccaccggtcctacagctgccaagtgacccacgagggctccaccgtggaaaagaccgtggctcctaccgagtgctcc

SEQ ID NO: 222 - DNA, 318 bp, Homo Sapien
ggccagcctaaagctgcccccagcgtcaccctgtttcctccctccagcgaggagctccaggccaacaaggccaccctcgtgtgcctgatctccgacttctatcccggcgctgtgaccgtggcttggaaagccgactccagccctgtcaaagccggcgtggagaccaccacaccctccaagcagtccaacaacaagtacgccgcctccagctatctctccctgacccctgagcagtggaagtcccaccggtcctactcctgtcaggtgacccacgagggctccaccgtggaaaagaccgtcgcccccaccgagtgctcc

SEQ ID NO: 223 - protein, 106 aa, Homo Sapien; identical to SEQ ID NO: 219

SEQ ID NO: 224 - DNA, 318 bp, Homo Sapien
ggtcagcccaaggctgccccctcggtcactctgttcccgccctcctctgaggagcttcaagccaacaaggccacactggtgtgtctcataagtgacttctacccgggagccgtgacagtggcctggaaggcagatagcagccccgtcaaggcgggagtggagaccaccacaccctccaaacaaagcaacaacaagtacgcggccagcagctatctgagcctgacgcctgagcagtggaagtcccacagaagctacagctgccaggtcacgcatgaagggagcaccgtggagaagacagtggcccctacagaatgttca

SEQ ID NO: 225 - protein, 106 aa, Homo Sapien
GQPKAAPSVTLFPPSSEELQANKATLVCLISDFYPGAVTVAWKADSSPVKAGVETTTPSKQSNNKYAASSYLSLTPEQWKSHRSYSCQVTHEGSTVEKTVAPTECS

SEQ ID NO: 226 - DNA, 312 bp, Homo Sapien
cccaaggctgccccctcggtcactctgttcccaccctcctctgaggagcttcaagccaacaaggccacactggtgtgtctcataagtgacttctacccgggagccgtgacagttgcctggaaggcagatagcagccccgtcaaggcgggggtggagaccaccacaccctccaaacaaagcaacaacaagtacgcggccagcagctacctgagcctgacgcctgagcagtggaagtcccacaaaagctacagctgccaggtcacgcatgaagggagcaccgtggagaagacagttgcccctacggaatgttca

SEQ ID NO: 227 - protein, 104 aa, Homo Sapien
PKAAPSVTLFPPSSEELQANKATLVCLISDFYPGAVTVAWKADSSPVKAGVETTTPSKQSNNKYAASSYLSLTPEQWKSHKSYSCQVTHEGSTVEKTVAPTECS

SEQ ID NO: 228 - DNA, 318 bp, Homo Sapien
ggtcagcccaaggctgccccctcggtcactctgttcccaccctcctctgaggagcttcaagccaacaaggccacactggtgtgtctcataagtgacttctacccggggccagtgacagttgcctggaaggcagatagcagccccgtcaaggcgggggtggagaccaccacaccctccaaacaaagcaacaacaagtacgcggccagcagctacctgagcctgacgcctgagcagtggaagtcccacaaaagctacagctgccaggtcacgcatgaagggagcaccgtggagaagacagtggcccctacggaatgttca

SEQ ID NO: 229 - protein, 106 aa, Homo Sapien
GQPKAAPSVTLFPPSSEELQANKATLVCLISDFYPGPVTVAWKADSSPVKAGVETTTPSKQSNNKYAASSYLSLTPEQWKSHKSYSCQVTHEGSTVEKTVAPTECS

SEQ ID NO: 230 - DNA, 318 bp, Homo Sapien
ggtcagcccaaggctgccccctcggtcactctgttcccaccctcctctgaggagcttcaagccaacaaggccacactggtgtgtctcataagtgacttctacccgggagccgtgacagtggcctggaaggcagatagcagccccgtcaaggcgggagtggagaccaccacaccctccaaacaaagcaacaacaagtacgcggccagcagctacctgagcctgacgcctgagcagtggaagtcccacaaaagctacagctgccaggtcacgcatgaagggagcaccgtggagaagacagtggcccctacagaatgttca

SEQ ID NO: 231 - protein, 106 aa, Homo Sapien
GQPKAAPSVTLFPPSSEELQANKATLVCLISDFYPGAVTVAWKADSSPVKAGVETTTPSKQSNNKYAASSYLSLTPEQWKSHKSYSCQVTHEGSTVEKTVAPTECS

SEQ ID NO: 232 - DNA, 318 bp, Homo Sapien
ggtcagcccaaggctgccccctcggtcactctgttcccgccctcctctgaggagcttcaagccaacaaggccacactggtgtgtctcataagtgacttctacccgggagccgtgacagtggcctggaaggcagatagcagccccgtcaaggcgggagtggagaccaccacaccctccaaacaaagcaacaacaagtacgcggccagcagctacctgagcctgacgcctgagcagtggaagtcccacagaagctacagctgccaggtcacgcatgaagggagcaccgtggagaagacagtggcccctacagaatgttca

SEQ ID NO: 233 - protein, 106 aa, Homo Sapien; identical to SEQ ID NO: 225

SEQ ID NO: 234 - DNA, 318 bp, Homo Sapien
ggtcagcccaaggctgccccatcggtcactctgttcccgccctcctctgaggagcttcaagccaacaaggccacactggtgtgcctgatcagtgacttctacccgggagctgtgaaagtggcctggaaggcagatggcagccccgtcaacacgggagtggagaccaccacaccctccaaacagagcaacaacaagtacgcggccagcagctacctgagcctgacgcctgagcagtggaagtcccacagaagctacagctgccaggtcacgcatgaagggagcaccgtggagaagacagtggcccctgcagaatgttca

SEQ ID NO: 235 - protein, 106 aa, Homo Sapien
GQPKAAPSVTLFPPSSEELQANKATLVCLISDFYPGAVKVAWKADGSPVNTGVETTTPSKQSNNKYAASSYLSLTPEQWKSHRSYSCQVTHEGSTVEKTVAPAECS

SEQ ID NO: 236 - DNA, 318 bp, Homo Sapien
ggtcagcccaaggctgccccatcggtcactctgttcccaccctcctctgaggagcttcaagccaacaaggccacactggtgtgtctcgtaagtgacttctacccgggagccgtgacagtggcctggaaggcagatggcagccccgtcaaggtgggagtggagaccaccaaaccctccaaacaaagcaacaacaagtatgcggccagcagctacctgagcctgacgcccgagcagtggaagtcccacagaagctacagctgccgggtcacgcatgaagggagcaccgtggagaagacagtggcccctgcagaatgctct

SEQ ID NO: 237 - protein, 106 aa, Homo Sapien
GQPKAAPSVTLFPPSSEELQANKATLVCLVSDFYPGAVTVAWKADGSPVKVGVETTKPSKQSNNKYAASSYLSLTPEQWKSHRSYSCRVTHEGSTVEKTVAPAECS

SEQ ID NO: 238 - protein, 8 aa, Homo Sapien
GFTFSDYY

SEQ ID NO: 239 - protein, 8 aa, Homo Sapien
ISTSGSTI

SEQ ID NO: 240 - protein, 16 aa, Homo Sapien
ARGITGTNFYHYGLGV

SEQ ID NO: 241 - protein, 5 aa, Homo Sapien
DYYMS

SEQ ID NO: 242 - protein, 17 aa, Homo Sapien
YISTSGSTIYYADSVKG

SEQ ID NO: 243 - protein, 14 aa, Homo Sapien
GITGTNFYHYGLGV

SEQ ID NO: 244 - protein, 123 aa, Homo Sapien
QVQLVESGGGLVKPGGSLRLSCAASGFTFSDYYMSWIRQVPGKGLEWVSYISTSGSTIYYADSVKGRFTISRDNAKNSLYLQMNSLRAEDAAVYHCARGITGTNFYHYGLGVWGQGTTVTVSS

SEQ ID NO: 245 - DNA, 370 bp, Homo Sapien
caggtgcagctggtggagtctgggggaggcttggtcaagcctggagggtccctgagactctcctgtgcagcctctggattcaccttcagtgactactacatgagctggatccgccaggttccagggaaggggctggagtgggtttcatacattagtactagtggtagtaccatatactacgcagactctgtgaagggccgattcaccatctccagggacaacgccaagaactcactgtatctacaaatgaacagcctgagagccgaggacgcggccgtgtatcactgtgcgagaggtataactggaactaacttctaccactacggtttgggcgtctggggccaagggaccacggtcaccgtctcctcag

SEQ ID NO: 246 - protein, 453 aa, Homo Sapien
QVQLVESGGGLVKPGGSLRLSCAASGFTFSDYYMSWIRQVPGKGLEWVSYISTSGSTIYYADSVKGRFTISRDNAKNSLYLQMNSLRAEDAAVYHCARGITGTNFYHYGLGVWGQGTTVTVSSASTKGPSVFPLAPSSKSTSGGTAALGCLVKDYFPEPVTVSWNSGALTSGVHTFPAVLQSSGLYSLSSVVTVPSSSLGTQTYICNVNHKPSNTKVDKKVEPKSCDKTHTCPPCPAPELLGGPSVFLFPPKPKDTLMISRTPEVTCVVVDVSHEDPEVKFNWYVDGVEVHNAKTKPREEQYNSTYRVVSVLTVLHQDWLNGKEYKCKVSNKALPAPIEKTISKAKGQPREPQVYTLPPSRDELTKNQVSLTCLVKGFYPSDIAVEWESNGQPENNYKTTPPVLDSDGSFFLYSKLTVDKSRWQQGNVFSCSVMHEALHNHYTQKSLSLSPGK

SEQ ID NO: 247 - DNA, 1359 bp, Homo Sapien
caggtgcagctggtggagtctgggggaggcttggtcaagcctggagggtccctgagactctcctgtgcagcctctggattcaccttcagtgactactacatgagctggatccgccaggttccagggaaggggctggagtgggtttcatacattagtactagtggtagtaccatatactacgcagactctgtgaagggccgattcaccatctccagggacaacgccaagaactcactgtatctacaaatgaacagcctgagagccgaggacgcggccgtgtatcactgtgcgagaggtataactggaactaacttctaccactacggtttgggcgtctggggccaagggaccacggtcaccgtctcctcagccagcaccaagggcccctctgtgttccctctggccccttccagcaagtccacctctggcggaacagccgctctgggctgcctcgtgaaggactacttccccgagcctgtgaccgtgtcctggaactctggcgctctgaccagcggagtgcacaccttccctgctgtgctgcagtcctccggcctgtactccctgtcctccgtcgtgaccgtgccttccagctctctgggcacccagacctacatctgcaacgtgaaccacaagccctccaacaccaaggtggacaagaaggtggaacccaagtcctgcgacaagacccacacctgtcccccttgtcctgcccctgaactgctgggcggaccttccgtgttcctgttccccccaaagcccaaggacaccctgatgatctcccggacccccgaagtgacctgcgtggtggtggatgtgtcccacgaggaccctgaagtgaagttcaattggtacgtggacggcgtggaagtgcacaacgccaagaccaagcctagagaggaacagtacaactccacctaccgggtggtgtccgtgctgaccgtgctgcaccaggattggctgaacggcaaagagtacaagtgcaaggtgtccaacaaggccctgcctgcccccatcgaaaagaccatctccaaggccaagggccagccccgggaaccccaggtgtacacactgccccctagcagggacgagctgaccaagaaccaggtgtccctgacctgtctcgtgaaaggcttctacccctccgatatcgccgtggaatgggagtccaacggccagcctgagaacaactacaagaccaccccccctgtgctggactccgacggctcattcttcctgtacagcaagctgacagtggacaagtcccggtggcagcagggcaacgtgttctcctgctccgtgatgcacgaggccctgcacaaccactacacccagaagtccctgtccctgagccccggcaag

SEQ ID NO: 248 - protein, 6 aa, Homo Sapien
QGINSW

SEQ ID NO: 249 - protein, 3 aa, Homo Sapien
AAS

SEQ ID NO: 250 - protein, 9 aa, Homo Sapien
QQVNSFPLT

SEQ ID NO: 251 - protein, 11 aa, Homo Sapien
RASQGINSWLA

SEQ ID NO: 252 - protein, 7 aa, Homo Sapien
AASTLQS

SEQ ID NO: 253 - protein, 9 aa, Homo Sapien
QQVNSFPLT

SEQ ID NO: 254 - protein, 107 aa, Homo Sapien
DIQMTQSPSSVSASVGDRVTITCRASQGINSWLAWYQQKPGKAPKLLIYAASTLQSGVPSRFSGSGSGADFTLTISSLQPEDFATYYCQQVNSFPLTFGGGTKVEIK

SEQ ID NO: 255 - DNA, 322 bp, Homo Sapien
gacatccagatgacccagtctccatcttccgtgtctgcatctgtaggagacagagtcaccatcacttgtcgggcgagtcagggtattaacagctggttagcctggtatcagcagaaaccagggaaagcccctaagctcctgatctatgctgcatccactttgcaaagtggggtcccatcaaggttcagcggcagtgggtctggggcagatttcactctcaccatcagcagcctgcagcctgaagattttgcaacttactattgtcaacaggttaacagtttcccgctcactttcggcggagggaccaaggtggagatcaaac

SEQ ID NO: 256 - protein, 214 aa, Homo Sapien
DIQMTQSPSSVSASVGDRVTITCRASQGINSWLAWYQQKPGKAPKLLIYAASTLQSGVPSRFSGSGSGADFTLTISSLQPEDFATYYCQQVNSFPLTFGGGTKVEIKRTVAAPSVFIFPPSDEQLKSGTASVVCLLNNFYPREAKVQWKVDNALQSGNSQESVTEQDSKDSTYSLSSTLTLSKADYEKHKVYACEVTHQGLSSPVTKSFNRGEC

SEQ ID NO: 257 - DNA, 642 bp, Homo Sapien
gacatccagatgacccagtctccatcttccgtgtctgcatctgtaggagacagagtcaccatcacttgtcgggcgagtcagggtattaacagctggttagcctggtatcagcagaaaccagggaaagcccctaagctcctgatctatgctgcatccactttgcaaagtggggtcccatcaaggttcagcggcagtgggtctggggcagatttcactctcaccatcagcagcctgcagcctgaagattttgcaacttactattgtcaacaggttaacagtttcccgctcactttcggcggagggaccaaggtggagatcaaacgtacggtggccgctccctccgtgttcatcttcccaccttccgacgagcagctgaagtccggcaccgcttctgtcgtgtgcctgctgaacaacttctacccccgcgaggccaaggtgcagtggaaggtggacaacgccctgcagtccggcaactcccaggaatccgtgaccgagcaggactccaaggacagcacctactccctgtcctccaccctgaccctgtccaaggccgactacgagaagcacaaggtgtacgcctgcgaagtgacccaccagggcctgtctagccccgtgaccaagtctttcaaccggggcgagtgt

SEQ ID NO: 258 - protein, 8 aa, Homo Sapien
GFTFSYYA

SEQ ID NO: 259 - protein, 8 aa, Homo Sapien
ISGGGGNT

SEQ ID NO: 260 - protein, 16 aa, Homo Sapien
AKDRMKQLVRAYYFDY

SEQ ID NO: 261 - protein, 5 aa, Homo Sapien
YYAMS

SEQ ID NO: 262 - protein, 17 aa, Homo Sapien
TISGGGGNTHYADSVKG

SEQ ID NO: 263 - protein, 14 aa, Homo Sapien
DRMKQLVRAYYFDY

SEQ ID NO: 264 - protein, 123 aa, Homo Sapien
EVPLVESGGGLVQPGGSLRLSCAASGFTFSYYAMSWVRQAPGKGLDWVSTISGGGGNTHYADSVKGRFTISRDNSKNTLYLHMNSLRAEDTAVYYCAKDRMKQLVRAYYFDYWGQGTLVTVSS

SEQ ID NO: 265 - DNA, 370 bp, Homo Sapien
gaggtgccgctggtggagtctgggggaggcttggtacagcctggggggtccctgagactctcctgtgcagcctctggattcacgtttagctactatgccatgagctgggtccgtcaggctccagggaaggggctggactgggtctcaactattagtggtggtggtggtaacacacactacgcagactccgtgaagggccgattcactatatccagagacaattccaagaacacgctgtatctgcacatgaacagcctgagagccgaagacacggccgtctattactgtgcgaaggatcggatgaaacagctcgtccgggcctactactttgactactggggccagggaaccctggtcaccgtctcctcag

SEQ ID NO: 266 - protein, 453 aa, Homo Sapien
EVPLVESGGGLVQPGGSLRLSCAASGFTFSYYAMSWVRQAPGKGLDWVSTISGGGGNTHYADSVKGRFTISRDNSKNTLYLHMNSLRAEDTAVYYCAKDRMKQLVRAYYFDYWGQGTLVTVSSASTKGPSVFPLAPSSKSTSGGTAALGCLVKDYFPEPVTVSWNSGALTSGVHTFPAVLQSSGLYSLSSVVTVPSSSLGTQTYICNVNHKPSNTKVDKKVEPKSCDKTHTCPPCPAPELLGGPSVFLFPPKPKDTLMISRTPEVTCVVVDVSHEDPEVKFNWYVDGVEVHNAKTKPREEQYNSTYRVVSVLTVLHQDWLNGKEYKCKVSNKALPAPIEKTISKAKGQPREPQVYTLPPSRDELTKNQVSLTCLVKGFYPSDIAVEWESNGQPENNYKTTPPVLDSDGSFFLYSKLTVDKSRWQQGNVFSCSVMHEALHNHYTQKSLSLSPGK

SEQ ID NO: 267 - DNA, 1359 bp, Homo Sapien
gaggtgccgctggtggagtctgggggaggcttggtacagcctggggggtccctgagactctcctgtgcagcctctggattcacgtttagctactatgccatgagctgggtccgtcaggctccagggaaggggctggactgggtctcaactattagtggtggtggtggtaacacacactacgcagactccgtgaagggccgattcactatatccagagacaattccaagaacacgctgtatctgcacatgaacagcctgagagccgaagacacggccgtctattactgtgcgaaggatcggatgaaacagctcgtccgggcctactactttgactactggggccagggaaccctggtcaccgtctcctcagccagcaccaagggcccctctgtgttccctctggccccttccagcaagtccacctctggcggaacagccgctctgggctgcctcgtgaaggactacttccccgagcctgtgaccgtgtcctggaactctggcgctctgaccagcggagtgcacaccttccctgctgtgctgcagtcctccggcctgtactccctgtcctccgtcgtgaccgtgccttccagctctctgggcacccagacctacatctgcaacgtgaaccacaagccctccaacaccaaggtggacaagaaggtggaacccaagtcctgcgacaagacccacacctgtcccccttgtcctgcccctgaactgctgggcggaccttccgtgttcctgttccccccaaagcccaaggacaccctgatgatctcccggacccccgaagtgacctgcgtggtggtggatgtgtcccacgaggaccctgaagtgaagttcaattggtacgtggacggcgtggaagtgcacaacgccaagaccaagcctagagaggaacagtacaactccacctaccgggtggtgtccgtgctgaccgtgctgcaccaggattggctgaacggcaaagagtacaagtgcaaggtgtccaacaaggccctgcctgcccccatcgaaaagaccatctccaaggccaagggccagccccgggaaccccaggtgtacacactgccccctagcagggacgagctgaccaagaaccaggtgtccctgacctgtctcgtgaaaggcttctacccctccgatatcgccgtggaatgggagtccaacggccagcctgagaacaactacaagaccaccccccctgtgctggactccgacggctcattcttcctgtacagcaagctgacagtggacaagtcccggtggcagcagggcaacgtgttctcctgctccgtgatgcacgaggccctgcacaaccactacacccagaagtccctgtccctgagccccggcaag

SEQ ID NO: 268 - protein, 6 aa, Homo Sapien
QDISTY

SEQ ID NO: 269 - protein, 3 aa, Homo Sapien
GTS

SEQ ID NO: 270 - protein, 9 aa, Homo Sapien
QQLHTDPIT

SEQ ID NO: 271 - protein, 11 aa, Homo Sapien
WASQDISTYLG

SEQ ID NO: 272 - protein, 7 aa, Homo Sapien
GTSSLQS

SEQ ID NO: 273 - protein, 9 aa, Homo Sapien
QQLHTDPIT

SEQ ID NO: 274 - protein, 107 aa, Homo Sapien
DIQLTQSPSFLSASVGDRVTITCWASQDISTYLGWYQQKPGKAPKLLIYGTSSLQSGVPSRFSGSGSGTEFTLTISSLQPEDFATYYCQQLHTDPITFGQGTRLEIK

SEQ ID NO: 275 - DNA, 322 bp, Homo Sapien
gacatccagttgacccagtctccatccttcctgtctgcatctgtaggagacagagtcaccatcacttgctgggccagtcaggacattagcacttatttaggctggtatcagcaaaaaccagggaaagcccctaagctcctgatctatggtacatccagtttgcaaagtggggtcccatcaaggttcagcggcagtggatctgggacagaattcactctcacaatcagcagcctgcagcctgaagattttgcaacttattactgtcaacagcttcatactgacccgatcaccttcggccaagggacacgactggagatcaaac

SEQ ID NO: 276 - protein, 214 aa, Homo Sapien
DIQLTQSPSFLSASVGDRVTITCWASQDISTYLGWYQQKPGKAPKLLIYGTSSLQSGVPSRFSGSGSGTEFTLTISSLQPEDFATYYCQQLHTDPITFGQGTRLEIKRTVAAPSVFIFPPSDEQLKSGTASVVCLLNNFYPREAKVQWKVDNALQSGNSQESVTEQDSKDSTYSLSSTLTLSKADYEKHKVYACEVTHQGLSSPVTKSFNRGEC

SEQ ID NO: 277 - DNA, 642 bp, Homo Sapien
gacatccagttgacccagtctccatccttcctgtctgcatctgtaggagacagagtcaccatcacttgctgggccagtcaggacattagcacttatttaggctggtatcagcaaaaaccagggaaagcccctaagctcctgatctatggtacatccagtttgcaaagtggggtcccatcaaggttcagcggcagtggatctgggacagaattcactctcacaatcagcagcctgcagcctgaagattttgcaacttattactgtcaacagcttcatactgacccgatcaccttcggccaagggacacgactggagatcaaacgtacggtggccgctccctccgtgttcatcttcccaccttccgacgagcagctgaagtccggcaccgcttctgtcgtgtgcctgctgaacaacttctacccccgcgaggccaaggtgcagtggaaggtggacaacgccctgcagtccggcaactcccaggaatccgtgaccgagcaggactccaaggacagcacctactccctgtcctccaccctgaccctgtccaaggccgactacgagaagcacaaggtgtacgcctgcgaagtgacccaccagggcctgtctagccccgtgaccaagtctttcaaccggggcgagtgt

SEQ ID NO: 278 - protein, 8 aa, Homo Sapien
GFTFSSYW

SEQ ID NO: 279 - protein, 8 aa, Homo Sapien
IKQDGSEK

SEQ ID NO: 280 - protein, 12 aa, Homo Sapien
ARVRQWSDYSDY

SEQ ID NO: 281 - protein, 5 aa, Homo Sapien
SYWMN

SEQ ID NO: 282 - protein, 17 aa, Homo Sapien
NIKQDGSEKYYVDSVKG

SEQ ID NO: 283 - protein, 10 aa, Homo Sapien
VRQWSDYSDY

SEQ ID NO: 284 - protein, 119 aa, Homo Sapien
EVHLVESGGGLVQPGGSLRLSCAASGFTFSSYWMNWVRQAPGKGLEWVANIKQDGSEKYYVDSVKGRFTVSRDNAKNSLYLQMNSLRAEDTAVYYCARVRQWSDYSDYWGQGTPVTVSS

SEQ ID NO: 285 - DNA, 358 bp, Homo Sapien
gaggtgcacctggtggagtctgggggaggcttggtccagcctggggggtccctgagactctcctgtgcagcctctggattcacctttagtagctattggatgaactgggtccgccaggctccagggaaggggctggagtgggtggccaacataaagcaagatggaagtgagaaatactatgtggactctgtgaagggccgcttcaccgtctccagagacaacgccaagaactcactgtatctgcaaatgaacagcctgagagccgaggacacggctgtgtattactgtgcgagagttcgacaatggtccgactactctgactactggggccagggaaccccggtcaccgtctcctcag

SEQ ID NO: 286 - protein, 449 aa, Homo Sapien
EVHLVESGGGLVQPGGSLRLSCAASGFTFSSYWMNWVRQAPGKGLEWVANIKQDGSEKYYVDSVKGRFTVSRDNAKNSLYLQMNSLRAEDTAVYYCARVRQWSDYSDYWGQGTPVTVSSASTKGPSVFPLAPSSKSTSGGTAALGCLVKDYFPEPVTVSWNSGALTSGVHTFPAVLQSSGLYSLSSVVTVPSSSLGTQTYICNVNHKPSNTKVDKKVEPKSCDKTHTCPPCPAPELLGGPSVFLFPPKPKDTLMISRTPEVTCVVVDVSHEDPEVKFNWYVDGVEVHNAKTKPREEQYNSTYRVVSVLTVLHQDWLNGKEYKCKVSNKALPAPIEKTISKAKGQPREPQVYTLPPSRDELTKNQVSLTCLVKGFYPSDIAVEWESNGQPENNYKTTPPVLDSDGSFFLYSKLTVDKSRWQQGNVFSCSVMHEALHNHYTQKSLSLSPGK

SEQ ID NO: 287 - DNA, 1347 bp, Homo Sapien
gaggtgcacctggtggagtctgggggaggcttggtccagcctggggggtccctgagactctcctgtgcagcctctggattcacctttagtagctattggatgaactgggtccgccaggctccagggaaggggctggagtgggtggccaacataaagcaagatggaagtgagaaatactatgtggactctgtgaagggccgcttcaccgtctccagagacaacgccaagaactcactgtatctgcaaatgaacagcctgagagccgaggacacggctgtgtattactgtgcgagagttcgacaatggtccgactactctgactactggggccagggaaccccggtcaccgtctcctcagccagcaccaagggcccctctgtgttccctctggccccttccagcaagtccacctctggcggaacagccgctctgggctgcctcgtgaaggactacttccccgagcctgtgaccgtgtcctggaactctggcgctctgaccagcggagtgcacaccttccctgctgtgctgcagtcctccggcctgtactccctgtcctccgtcgtgaccgtgccttccagctctctgggcacccagacctacatctgcaacgtgaaccacaagccctccaacaccaaggtggacaagaaggtggaacccaagtcctgcgacaagacccacacctgtcccccttgtcctgcccctgaactgctgggcggaccttccgtgttcctgttccccccaaagcccaaggacaccctgatgatctcccggacccccgaagtgacctgcgtggtggtggatgtgtcccacgaggaccctgaagtgaagttcaattggtacgtggacggcgtggaagtgcacaacgccaagaccaagcctagagaggaacagtacaactccacctaccgggtggtgtccgtgctgaccgtgctgcaccaggattggctgaacggcaaagagtacaagtgcaaggtgtccaacaaggccctgcctgcccccatcgaaaagaccatctccaaggccaagggccagccccgggaaccccaggtgtacacactgccccctagcagggacgagctgaccaagaaccaggtgtccctgacctgtctcgtgaaaggcttctacccctccgatatcgccgtggaatgggagtccaacggccagcctgagaacaactacaagaccaccccccctgtgctggactccgacggctcattcttcctgtacagcaagctgacagtggacaagtcccggtggcagcagggcaacgtgttctcctgctccgtgatgcacgaggccctgcacaaccactacacccagaagtccctgtccctgagccccggcaag

SEQ ID NO: 288 - protein, 6 aa, Homo Sapien
QGISSW

SEQ ID NO: 289 - protein, 3 aa, Homo Sapien
AAS

SEQ ID NO: 290 - protein, 9 aa, Homo Sapien
QQANSFPFT

SEQ ID NO: 291 - protein, 11 aa, Homo Sapien
RASQGISSWLA

SEQ ID NO: 292 - protein, 7 aa, Homo Sapien
AASSLQS

SEQ ID NO: 293 - protein, 9 aa, Homo Sapien
QQANSFPFT

SEQ ID NO: 294 - protein, 107 aa, Homo Sapien
DIQMTQSPSSVSASVGDRVTITCRASQGISSWLAWYQQKPGKAPKLLIYAASSLQSGVPSRFSGSGSGTDFTLTISSLQPEDFATYYCQQANSFPFTFGPGTKVDIK

SEQ ID NO: 295 - DNA, 322 bp, Homo Sapien
gacatccagatgacccagtctccatcttccgtgtctgcatctgtaggagacagagtcaccatcacttgtcgggcgagtcagggtattagcagctggttagcctggtatcagcagaaaccagggaaagcccctaagctcctgatctatgctgcatccagtttgcaaagtggggtcccatcaaggttcagcggcagtggatctgggacagatttcactctcaccatcagcagcctgcagcctgaagattttgcaacttactattgtcaacaggctaacagtttcccattcactttcggccctgggaccaaagtggatatcaaac

SEQ ID NO: 296 - protein, 214 aa, Homo Sapien
DIQMTQSPSSVSASVGDRVTITCRASQGISSWLAWYQQKPGKAPKLLIYAASSLQSGVPSRFSGSGSGTDFTLTISSLQPEDFATYYCQQANSFPFTFGPGTKVDIKRTVAAPSVFIFPPSDEQLKSGTASVVCLLNNFYPREAKVQWKVDNALQSGNSQESVTEQDSKDSTYSLSSTLTLSKADYEKHKVYACEVTHQGLSSPVTKSFNRGEC

SEQ ID NO: 297 - DNA, 642 bp, Homo Sapien
gacatccagatgacccagtctccatcttccgtgtctgcatctgtaggagacagagtcaccatcacttgtcgggcgagtcagggtattagcagctggttagcctggtatcagcagaaaccagggaaagcccctaagctcctgatctatgctgcatccagtttgcaaagtggggtcccatcaaggttcagcggcagtggatctgggacagatttcactctcaccatcagcagcctgcagcctgaagattttgcaacttactattgtcaacaggctaacagtttcccattcactttcggccctgggaccaaagtggatatcaaacgtacggtggccgctccctccgtgttcatcttcccaccttccgacgagcagctgaagtccggcaccgcttctgtcgtgtgcctgctgaacaacttctacccccgcgaggccaaggtgcagtggaaggtggacaacgccctgcagtccggcaactcccaggaatccgtgaccgagcaggactccaaggacagcacctactccctgtcctccaccctgaccctgtccaaggccgactacgagaagcacaaggtgtacgcctgcgaagtgacccaccagggcctgtctagccccgtgaccaagtctttcaaccggggcgagtgt

SEQ ID NO: 298 - protein, 214 aa, Homo Sapien
DIQMTQSPSSLSASVGDRVTITCRASQSISSYLNWYQQKPGKAPKLLIYYASSLQSGVPSRFSGSGSGTDFTLTISSLQPEDFATYYCQQSYSTPITFGQGTRLEIKRTVAAPSVFIFPPSDEQLKSGTASVVCLLNNFYPREAKVQWKVDNALQSGNSQESVTEQDSKDSTYSLSSTLTLSKADYEKHKVYACEVTHQGLSSPVTKSFNRGEC

SEQ ID NO: 299 - protein, 453 aa, Homo Sapien
EVQLVESGGGLVQPGRSLRLSCAASGFTFDDYAMHWVRQVPGKGLEWVSGISWIRTGIGYADSVKGRFTIFRDNAKNSLYLQMNSLRAEDTALYYCAKDMKGSGTYGGWFDTWGQGTLVTVSSASTKGPSVFPLAPSSKSTSGGTAALGCLVKDYFPEPVTVSWNSGALTSGVHTFPAVLQSSGLYSLSSVVTVPSSSLGTQTYICNVNHKPSNTKVDKKVEPKSCDKTHTCPPCPAPELAGAPSVFLFPPKPKDTLMISRTPEVTCVVVDVSHEDPEVKFNWYVDGVEVHNAKTKPREEQYNSTYRVVSVLTVLHQDWLNGKEYKCKVSNKALPAPIEKTISKAKGQPREPQVYTLPPSRDELTKNQVSLTCLVKGFYPSDIAVEWESNGQPENNYKTTPPVLDSDGSFFLYSKLTVDKSRWQQGNVFSCSVMHEALHNHYTQKSLSLSPGK

SEQ ID NO: 300 - protein, 347 aa, Homo Sapien
DIQMTQSPSSLSASVGDRVTITCRASQSISSYLNWYQQKPGKAPKLLIYVASSLQSGVPSRFSGSGSGTDFTLTISSLQPEDFATYYCQQSYSTPITFGQGTRLEIKRTVAAPSVFIFPPSDEQLKSGTASVVCLLNNFYPREAKVQWKVDNALQSGNSQESVTEQDSKDSTYSLSSTLTLSKADYEKHKVYACEVTHQGLSSPVTKSFNRGECAPTSSSTKKTQLQLEHLLLDLQMILNGINNYKNPKLTRMLTFKFYMPKKATELKHLQCLEEELKPLEEVLNLAQSKNFHLRPRDLISNINVIVLELKGSETTFMCEYADETATIVEFLNRWITFCQSIISTLT

SEQ ID NO: 301 - protein, 133 aa, Homo Sapien [sequence omitted]

SEQ ID NO: 302 - protein, 586 aa, Homo Sapien
EVQLVESGGGLVQPGRSLRLSCAASGFTFDDYAMHWVRQVPGKGLEWVSGISWIRTGIGYADSVKGRFTIFRDNAKNSLYLQMNSLRAEDTALYYCAKDMKGSGTYGGWFDTWGQGTLVTVSSASTKGPSVFPLAPSSKSTSGGTAALGCLVKDYFPEPVTVSWNSGALTSGVHTFPAVLQSSGLYSLSSVVTVPSSSLGTQTYICNVNHKPSNTKVDKKVEPKSCDKTHTCPPCPAPELAGAPSVFLFPPKPKDTLMISRTPEVTCVVVDVSHEDPEVKFNWYVDGVEVHNAKTKPREEQYNSTYRVVSVLTVLHQDWLNGKEYKCKVSNKALPAPIEKTISKAKGQPREPQVYTLPPSRDELTKNQVSLTCLVKGFYPSDIAVEWESNGQPENNYKTTPPVLDSDGSFFLYSKLTVDKSRWQQGNVFSCSVMHEALHNHYTQKSLSLSPGKAPTSSSTKKTQLQLEHLLLDLQMILNGINNYKNPKLTRMLTFKFYMPKKATELKHLQCLEEELKPLEEVLNLAQSKNFHLRPRDLISNINVIVLELKGSETTFMCEYADETATIVEFLNRWITFCQSIISTLT

SEQ ID NO: 303 - protein, 14 aa, Homo Sapien
APTSTQLQLELLLD

SEQ ID NO: 304 - protein, 11 aa, Homo Sapien
TQLQLEHLLLD

SEQ ID NO: 305 - protein, 17 aa, Homo Sapien
APTSKKTQLQLEHLLLD

SEQ ID NO: 306 - protein, 19 aa, Homo Sapien
PTSSSTKKTQLQLEHLLLD

SEQ ID NO: 307 - protein, 18 aa, Homo Sapien
TSSSTKKTQLQLEHLLLD

SEQ ID NO: 308 - protein, 17 aa, Homo Sapien
SSSTKKTQLQLEHLLLD

SEQ ID NO: 309 - protein, 16 aa, Homo Sapien
SSTKKTQLQLEHLLLD

SEQ ID NO: 310 - protein, 15 aa, Homo Sapien
STKKTQLQLEHLLLD

SEQ ID NO: 311 - protein, 14 aa, Homo Sapien
TKKTQLQLEHLLLD

SEQ ID NO: 312 - protein, 13 aa, Homo Sapien
KKTQLQLEHLLLD

SEQ ID NO: 313 - protein, 12 aa, Homo Sapien
KTQLQLEHLLLD

SEQ ID NO: 314 - protein, 19 aa, Homo Sapien
APTSSSTKTQLQLEHLLLD

SEQ ID NO: 315 - protein, 18 aa, Homo Sapien
APTSSSTTQLQLEHLLLD

SEQ ID NO: 316 - protein, 17 aa, Homo Sapien
APTSSSTQLQLEHLLLD

SEQ ID NO: 317 - protein, 16 aa, Homo Sapien
APTSSTQLQLEHLLLD

SEQ ID NO: 318 - protein, 14 aa, Homo Sapien
APTTQLQLEHLLLD

SEQ ID NO: 319 - protein, 13 aa, Homo Sapien
APTQLQLEHLLLD

SEQ ID NO: 320 - protein, 12 aa, Homo Sapien
ATQLQLEHLLLD

SEQ ID NO: 321 - protein, 15 aa, Homo Sapien
ATKKTQLQLEHLLLD

SEQ ID NO: 322 - protein, 15 aa, Homo Sapien
APKKTQLQLEHLLLD

SEQ ID NO: 323 - protein, 15 aa, Homo Sapien
APTKTQLQLEHLLLD

SEQ ID NO: 324 - protein, 113 aa, Homo Sapien
LQMILNGINNYKNPKLTRMLTFKFYMPKKATELKHLQCLEEELKPLEEVLNLAQSKNFHLRPRDLISNINVIVLELKGSETTFMCEYADETATIVEFLNRWITFCQSIISTLT

SEQ ID NO: 325 - protein, 290 aa, Mus Musculus
MRIFAGIIFTACCHLLRAFTITAPKDLYVVEYGSNVTMECRFPVERELDLLALVVYWEKEDEQVIQFVAGEEDLKPQHSNFRGRASLPKDQLLKGNAALQITDVKLQDAGVYCCIISYGGADYKRITLKVNAPYRKINQRISVDPATSEHELICQAEGYPEAEVIWTNSDHQPVSGKRSVTTSRTEGMLLNVTSSLRVNATANDVFYCTFWRSQPGQNHTAELIIPELPATHPPQNRTHWVLLGSILLFLIVVSTVLLFLRKQVRMLDVEKCGVEDTSSKNRNDTQFEET

SEQ ID NO: 326 - protein, 226 aa, Mus Musculus
FTITAPKDLYVVEYGSNVTMECRFPVERELDLLALVVYWEKEDEQVIQFVAGEEDLKPQHSNFRGRASLPKDQLLKGNAALQITDVKLQDAGVYCCIISYGGADYKRITLKVNAPYRKINQRISVDPATSEHELICQAEGYPEAEVIWTNSDHQPVSGKRSVTTSRTEGMLLNVTSSLRVNATANDVFYCTFWRSQPGQNHTAELIIPELPATHPPQNRTHHHHHH

SEQ ID NO: 327 - protein, 251 aa, Homo Sapien
ELCDDDPPEIPHATFKAMAYKEGTMLNCECKRGFRRIKSGSLYMLCTGNSSHSSWDNQCQCTSSATRNTTKQVTPQPEEQKERKTTEMQSPMQPVDQASLPGHCREPPPWENEATERIYHFVVGQMVYYQCVQGYRALHRGPAESVCKMTHGKTRWTQPQLICTGEMETSQFPGEEKPQASPEGRPESETSCLVTTTDFQIQTEMAATMETSIFTTEYQVAVAGCVFLLISVLLLSGLTWQRRQRKSRRTI

SEQ ID NO: 328 - protein, 525 aa, Homo Sapien
AVNGTSQFTCFYNSRANISCVWSQDGALQDTSCQVHAWPDRRRWNQTCELLPVSQASWACNLILGAPDSQKLTTVDIVTLRVLCREGVRWRVMAIQDFKPFENLRLMAPISLQVVHVETHRCNISWEISQASHYFERHLEFEARTLSPGHTWEEAPLLTLKQKQEWICLETLTPDTQYEFQVRVKPLQGEFTTWSPWSQPLAFRTKPAALGKDTIPWLGHLLVGLSGAFGFIILVYLLINCRNTGPWLKKVLKCNTPDPSKFFSQLSSEHGGDVQKWLSSPFPSSSFSPGGLAPEISPLEVLERDKVTQLLLQQDKVPEPASLSSNHSLTSCFTNQGYFFFHLPDALEIEACQVYFTYDPYSEEDPDEGVAGAPTGSSPQPLQPLSGEDDAYCTFPSRDDLLLFSPSLLGGPSPPSTAPGGSGAGEERMPPSLQERVPRDWDPQPLGPPTPGVPDLVDFQPPPELVLREAGEEVPDAGPREGVSFPWSRPPGQGEFRALNARLPLNTDAYLSLQELQGQDPTHLV

SEQ ID NO: 329 - protein, 347 aa, Homo Sapien
LNTTILTPNGNEDTTADFFLTTMPTDSLSVSTLPLPEVQCFVFNVEYMNCTWNSSSEPQPTNLTLHYWYKNSDNDKVQKCSHYLFSEEITSGCQLQKKEIHLYQTFVVQLQDPREPRRQATQMLKLQNLVIPWAPENLTLHKLSESQLELNWNNRFLNHCLEHLVQYRTDWDHSWTEQSVDYRHKFSLPSVDGQKRYTFRVRSRFNPLCGSAQHWSEWSHPIHWGSNTSKENPFLFALEAVVISVGSMGLIISLLCVYFWLERTMPRIPTLKNLEDLVTEYHGNFSAWSGVSKGLAESLQPDYSERLCLVSEIPPKGGALGEGPGASPCNQHSPYWAPPCYTLKPET

SEQ ID NO: 330 - protein, 152 aa, Homo Sapien
DCDIEGKDGKQYESVLMVSIDQLLDSMKEIGSNCLNNEFNFFKRHICDANKEGMFLFRAARKLRQFLKMNSTGDFDLHLLKVSEGTTILLNCTGQVKGRKPAALGEAQPTKSLEENKSLKEQKKLNDLCFLKRLLQEIKTCWNKILMGTKEH

SEQ ID NO: 331 - protein, 133 aa, Homo Sapien
GIHVFILGCFSAGLPKTEANWVNVISDLKKIEDLIQSMHIDATLYTESDVHPSCKVTAMKCFLLELQVISLESGDASIHDTVENLIILANNSLSSNGNVTESGCKECEELEEKNIKEFLQSFVHIVQMFINTS

SEQ ID NO: 332 - protein, 133 aa, Homo Sapien [sequence omitted]

SEQ ID NO: 333 - protein, 127 aa, Homo Sapien [sequence omitted]

SEQ ID NO: 334 - protein, 171 aa, Homo Sapien
CDLPQNHGLLSRNTLVLLHQMRRISPFLCLKDRRDFRFPQEMVKGSQLQKAHVMSVLHEMLQQIFSLFHTERSSAAWNMTLLDQLHTELHQQLQHLETCLLQVVGEGESAGAISSPALTLRRYFQGIRVYLKEKKYSDCAWEVVRMEIMKSLFLSTNMQERLRSKDRDLGS

SEQ ID NO: 335 - protein, 177 aa, Homo Sapien
GPQREEFPRDLSLISPLAQAVRSSSRTPSDKPVAHVVANPQAEGQLQWLNRRANALLANGVELRDNQLVVPSEGLYLIYSQVLFKGQGCPSTHVLLTHTISRIAVSYQTKVNLLSAIKSPCQRETPEGAEAKPWYEPIYLGGVFQLEKGDRLSAEINRPDYLDFAESGQVYFGIIAL

SEQ ID NO: 336 - protein, 197 aa, Homo Sapien
RNLPVATPDPGMFPCLHHSQNLLRAVSNMLQKARQTLEFYPCTSEEIDHEDITKDKTSTVEACLPLELTKNESCLNSRETSFITNGSCLASRKTSFMMALCLSSIYEDLKMYQVEFKTMNAKLLMDPKRQIFLDQNMLAVIDELMQALNFNSETVPQKSSLEEPDFYKTKIKLCILLHAFRIRAVTIDRVMSYLNAS

SEQ ID NO: 337 - protein, 306 aa, Homo Sapien
IWELKKDVYVVELDWYPDAPGEMVVLTCDTPEEDGITWTLDQSSEVLGSGKTLTIQVKEFGDAGQYTCHKGGEVLSHSLLLLHKKEDGIWSTDILKDQKEPKNKTFLRCEAKNYSGRFTCWWLTTISTDLTFSVKSSRGSSDPQGVTCGAATLSAERVRGDNKEYEYSVECQEDSACPAAEESLPIEVMVDAVHKLKYENYTSSFFIRDIIKPDPPKNLQLKPLKNSRQVEVSWEYPDTWSTPHSYFSLTFCVQVQGKSKREKKDRVFTDKTSATVICRKNASISVRAQDRYYSSSWSEWASVPCS

SEQ ID NO: 338 - protein, 103 aa, Homo Sapien
TPVVRKGRCSCISTNQGTIHLQSLKDLKQFAPSPSCEKIEIIATLKNGVQTCLNPDSADVKELIKKWEKQVSQKKKQKNGKKHQKKKVLKVRKSQRSRQKKTT

SEQ ID NO: 339 - protein, 77 aa, Homo Sapien
VPLSRTVRCTCISISNQPVNPRSLEKLEIIPASQFCPRVEIIATMKKKGEKRCLNPESKAIKNLLKAVSKERSKRSP

SEQ ID NO: 340 - protein, 330 aa, Homo Sapien [sequence omitted]

SEQ ID NO: 341 - DNA, 996 bp, Homo Sapien
gccagcaccaagggcccctctgtgttccctctggccccttccagcaagtccacctctggcggaacagccgctctgggctgcctcgtgaaggactacttccccgagcctgtgaccgtgtcctggaactctggcgctctgaccagcggagtgcacaccttccctgctgtgctgcagtcctccggcctgtactccctgtcctccgtcgtgaccgtgccttccagctctctgggcacccagacctacatctgcaacgtgaaccacaagccctccaacaccaaggtggacaagaaggtggaacccaagtcctgcgacaagacccacacctgtcccccttgtcctgcccctgaactgctgggcggaccttccgtgttcctgttccccccaaagcccaaggacaccctgatgatctcccggacccccgaagtgacctgcgtggtggtggatgtgtcccacgaggaccctgaagtgaagttcaattggtacgtggacggcgtggaagtgcacaacgccaagaccaagcctagagaggaacagtacaactccacctaccgggtggtgtccgtgctgaccgtgctgcaccaggattggctgaacggcaaagagtacaagtgcaaggtgtccaacaaggccctgcctgcccccatcgaaaagaccatctccaaggccaagggccagccccgggaaccccaggtgtacacactgccccctagcagggacgagctgaccaagaaccaggtgtccctgacctgtctcgtgaaaggcttctacccctccgatatcgccgtggaatgggagtccaacggccagcctgagaacaactacaagaccaccccccctgtgctggactccgacggctcattcttcctgtacagcaagctgacagtggacaagtcccggtggcagcagggcaacgtgttctcctgctccgtgatgcacgaggccctgcacaaccactacacccagaagtccctgtccctgagccccggcaagtgatga

SEQ ID NO: 342 - protein, 450 aa, Homo Sapien
EVQLVESGGGLVQPGRSLRLSCAASGFTFDDYAMHWVRQAPGKGLEWVSGISWIRTGIGYADSVKGRFTISRDNAKNSLYLQMNSLRAEDTALYYCAKDMKGSGTYGGWFDTWGQGTLVTVSSASTKGPSVFPLAPCSRSTSESTAALGCLVKDYFPEPVTVSWNSGALTSGVHTFPAVLQSSGLYSLSSVVTVPSSSLGTKTYTCNVDHKPSNTKVDKRVESKYGPPCPPCPAPELAGAPSVFLFPPKPKDTLMISRTPEVTCVVVDVSQEDPEVQFNWYVDGVEVHNAKTKPREEQFNSTYRVVSVLTVLHQDWLNGKEYKCKVSNKGLPSSIEKTISKAKGQPREPQVYTLPPSQEEMTKNQVSLTCLVKGFYPSDIAVEWESNGQPENNYKTTPPVLDSDGSFFLYSRLTVDKSRWQEGNVFSCSVMHEALHNHYTQKSLSLSLGK

SEQ ID NO: 343 - protein, 8 aa, Homo Sapien
GFTFSNYA

SEQ ID NO: 344 - protein, 8 aa, Homo Sapien
ISFSGGTT

SEQ ID NO: 345 - protein, 14 aa, Homo Sapien
AKDEAPAGATFFDS

SEQ ID NO: 346 - protein, 5 aa, Homo Sapien
NYAMS

SEQ ID NO: 347 - protein, 17 aa, Homo Sapien
AISFSGGTTYYADSVKG

SEQ ID NO: 348 - protein, 12 aa, Homo Sapien
DEAPAGATFFDS

SEQ ID NO: 349 - protein, 121 aa, Homo Sapien
EVQLAESGGGLVQPGGSLRLSCAASGFTFSNYAMSWVRQTPGKGLEWVSAISFSGGTTYYADSVKGRFTISRDNSKNTLYLHMNSLRADDTAVYYCAKDEAPAGATFFDSWGQGTLVTVSS

SEQ ID NO: 350 - DNA, 364 bp, Homo Sapien
gaagtgcaactggcggagtctgggggaggcttggtacagccgggggggtccctgagactctcctgtgcagcctctggattcacctttagcaactatgccatgagttgggtccgccagactccaggaaaggggctggagtgggtctcagctattagttttagtggtggtactacatactacgctgactccgtgaagggccggttcaccatctccagagacaattccaagaacacgctgtatttgcacatgaacagcctgagagccgatgacacggccgtatattactgtgcgaaagatgaggcaccagctggcgcaaccttctttgactcctggggccagggaacgctggtcaccgtctcctcag

SEQ ID NO: 351 - protein, 448 aa, Homo Sapien
EVQLAESGGGLVQPGGSLRLSCAASGFTFSNYAMSWVRQTPGKGLEWVSAISFSGGTTYYADSVKGRFTISRDNSKNTLYLHMNSLRADDTAVYYCAKDEAPAGATFFDSWGQGTLVTVSSASTKGPSVFPLAPCSRSTSESTAALGCLVKDYFPEPVTVSWNSGALTSGVHTFPAVLQSSGLYSLSSVVTVPSSSLGTKTYTCNVDHKPSNTKVDKRVESKYGPPCPPCPAPEFEGGPSVFLFPPKPKDTLMISRTPEVTCVVVDVSQEDPEVQFNWYVDGVEVHNAKTKPREEQFNSTYRVVSVLTVLHQDWLNGKEYKCKVSNKGLPSSIEKTISKAKGQPREPQVYTLPPSQEEMTKNQVSLTCLVKGFYPSDIAVEWESNGQPENNYKTTPPVLDSDGSFFLYSRLTVDKSRWQEGNVFSCSVMHEALHNHYTQKSLSLSLGK

SEQ ID NO: 352 - DNA, 1344 bp, Homo Sapien
gaagtgcaactggcggagtctgggggaggcttggtacagccgggggggtccctgagactctcctgtgcagcctctggattcacctttagcaactatgccatgagttgggtccgccagactccaggaaaggggctggagtgggtctcagctattagttttagtggtggtactacatactacgctgactccgtgaagggccggttcaccatctccagagacaattccaagaacacgctgtatttgcacatgaacagcctgagagccgatgacacggccgtatattactgtgcgaaagatgaggcaccagctggcgcaaccttctttgactcctggggccagggaacgctggtcaccgtctcctcagccagcaccaagggcccttccgtgttccccctggccccttgcagcaggagcacctccgaatccacagctgccctgggctgtctggtgaaggactactttcccgagcccgtgaccgtgagctggaacagcggcgctctgacatccggcgtccacacctttcctgccgtcctgcagtcctccggcctctactccctgtcctccgtggtgaccgtgcctagctcctccctcggcaccaagacctacacctgtaacgtggaccacaaaccctccaacaccaaggtggacaaacgggtcgagagcaagtacggccctccctgccctccttgtcctgcccccgagttcgaaggcggacccagcgtgttcctgttccctcctaagcccaaggacaccctcatgatcagccggacacccgaggtgacctgcgtggtggtggatgtgagccaggaggaccctgaggtccagttcaactggtatgtggatggcgtggaggtgcacaacgccaagacaaagccccgggaagagcagttcaactccacctacagggtggtcagcgtgctgaccgtgctgcatcaggactggctgaacggcaaggagtacaagtgcaaggtcagcaataagggactgcccagcagcatcgagaagaccatctccaaggctaaaggccagccccgggaacctcaggtgtacaccctgcctcccagccaggaggagatgaccaagaaccaggtgagcctgacctgcctggtgaagggattctacccttccgacatcgccgtggagtgggagtccaacggccagcccgagaacaattataagaccacccctcccgtcctcgacagcgacggatccttctttctgtactccaggctgaccgtggataagtccaggtggcaggaaggcaacgtgttcagctgctccgtgatgcacgaggccctgcacaatcactacacccagaagtccctgagcctgtccctgggaaag

SEQ ID NO: 353 - protein, 6 aa, Homo Sapien
QGIRRW

SEQ ID NO: 354 - protein, 3 aa, Homo Sapien
GAS

SEQ ID NO: 355 - protein, 9 aa, Homo Sapien
QQANSFPIT

SEQ ID NO: 356 - protein, 11 aa, Homo Sapien
RASQGIRRWLA

SEQ ID NO: 357 - protein, 7 aa, Homo Sapien
GASSLQS

SEQ ID NO: 358 - protein, 9 aa, Homo Sapien
QQANSFPIT

SEQ ID NO: 359 - protein, 107 aa, Homo Sapien
DIQMTQSPSSVSASVGDRVTITCRASQGIRRWLAWYQQKPGKAPKLLISGASSLQSGVPSRFSGSGSGTDFTLIITSLQPEDFATYYCQQANSFPITFGQGTRLEIK

SEQ ID NO: 360 - DNA, 322 bp, Homo Sapien
gacatccagatgacccagtctccatcttccgtgtctgcatctgtaggagacagagtcaccatcacttgtcgggcgagtcagggtattaggaggtggttagcctggtatcagcagaaaccagggaaagcccctaaactcctgatctctggtgcatccagtttgcaaagtggggtcccatcaaggttcagcggcagtggatctgggacagatttcactctcatcattaccagtctgcagcctgaagattttgcaacttactattgtcaacaggctaacagtttcccgatcaccttcggccaagggacacgactggagatcaaac

SEQ ID NO: 361 - protein, 214 aa, Homo Sapien
DIQMTQSPSSVSASVGDRVTITCRASQGIRRWLAWYQQKPGKAPKLLISGASSLQSGVPSRFSGSGSGTDFTLIITSLQPEDFATYYCQQANSFPITFGQGTRLEIKRTVAAPSVFIFPPSDEQLKSGTASVVCLLNNFYPREAKVQWKVDNALQSGNSQESVTEQDSKDSTYSLSSTLTLSKADYEKHKVYACEVTHQGLSSPVTKSFNRGEC

SEQ ID NO: 362 - DNA, 642 bp, Homo Sapien
gacatccagatgacccagtctccatcttccgtgtctgcatctgtaggagacagagtcaccatcacttgtcgggcgagtcagggtattaggaggtggttagcctggtatcagcagaaaccagggaaagcccctaaactcctgatctctggtgcatccagtttgcaaagtggggtcccatcaaggttcagcggcagtggatctgggacagatttcactctcatcattaccagtctgcagcctgaagattttgcaacttactattgtcaacaggctaacagtttcccgatcaccttcggccaagggacacgactggagatcaaacgtacggtggccgctccctccgtgttcatcttcccaccttccgacgagcagctgaagtccggcaccgcttctgtcgtgtgcctgctgaacaacttctacccccgcgaggccaaggtgcagtggaaggtggacaacgccctgcagtccggcaactcccaggaatccgtgaccgagcaggactccaaggacagcacctactccctgtcctccaccctgaccctgtccaaggccgactacgagaagcacaaggtgtacgcctgcgaagtgacccaccagggcctgtctagccccgtgaccaagtctttcaaccggggcgagtgt

SEQ ID NO: 363 - protein, 8 aa, Homo Sapien
GYTFSTFG

SEQ ID NO: 364 - protein, 8 aa, Homo Sapien
ISAYNGDT

SEQ ID NO: 365 - protein, 14 aa, Homo Sapien
ARSSGHYYYYGMDV

SEQ ID NO: 366 - protein, 121 aa, Homo Sapien
QVQVVQSGAEVKKPGASVKVSCKASGYTFSTFGITWVRQAPGQGLEWMGWISAYNGDTNYAQNLQGRVIMTTDTSTSTAYMELRSLRSDDTAVYYCARSSGHYYYYGMDVWGQGTTVTVSS

SEQ ID NO: 367 - DNA, 363 bp, Homo Sapien
caggttcaggtggtgcagtctggagctgaggtgaagaagcctggggcctcagtgaaggtctcctgcaaggcttctggttacaccttttccacctttggtatcacctgggtgcgacaggcccctggacaagggcttgaatggatgggatggatcagcgcttacaatggtgacacaaactatgcacagaatctccagggcagagtcatcatgaccacagacacatccacgagcacagcctacatggagctgaggagcctgagatctgacgacacggccgtttattactgtgcgaggagcagtggccactactactactacggtatggacgtctggggccaagggaccacggtcaccgtctcctca

SEQ ID NO: 368 - protein, 451 aa, Homo Sapien
QVQVVQSGAEVKKPGASVKVSCKASGYTFSTFGITWVRQAPGQGLEWMGWISAYNGDTNYAQNLQGRVIMTTDTSTSTAYMELRSLRSDDTAVYYCARSSGHYYYYGMDVWGQGTTVTVSSASTKGPSVFPLAPSSKSTSGGTAALGCLVKDYFPEPVTVSWNSGALTSGVHTFPAVLQSSGLYSLSSVVTVPSSSLGTQTYICNVNHKPSNTKVDKKVEPKSCDKTHTCPPCPAPELLGGPSVFLFPPKPKDTLMISRTPEVTCVVVDVSHEDPEVKFNWYVDGVEVHNAKTKPREEQYNSTYRVVSVLTVLHQDWLNGKEYKCKVSNKALPAPIEKTISKAKGQPREPQVYTLPPSRDELTKNQVSLTCLVKGFYPSDIAVEWESNGQPENNYKTTPPVLDSDGSFFLYSKLTVDKSRWQQGNVFSCSVMHEALHNHYTQKSLSLSPGK

SEQ ID NO: 369 - DNA, 1359 bp, Homo Sapien
caggttcaggtggtgcagtctggagctgaggtgaagaagcctggggcctcagtgaaggtctcctgcaaggcttctggttacaccttttccacctttggtatcacctgggtgcgacaggcccctggacaagggcttgaatggatgggatggatcagcgcttacaatggtgacacaaactatgcacagaatctccagggcagagtcatcatgaccacagacacatccacgagcacagcctacatggagctgaggagcctgagatctgacgacacggccgtttattactgtgcgaggagcagtggccactactactactacggtatggacgtctggggccaagggaccacggtcaccgtctcctcagccagcaccaagggcccctctgtgttccctctggccccttccagcaagtccacctctggcggaacagccgctctgggctgcctcgtgaaggactacttccccgagcctgtgaccgtgtcctggaactctggcgctctgaccagcggagtgcacaccttccctgctgtgctgcagtcctccggcctgtactccctgtcctccgtcgtgaccgtgccttccagctctctgggcacccagacctacatctgcaacgtgaaccacaagccctccaacaccaaggtggacaagaaggtggaacccaagtcctgcgacaagacccacacctgtcccccttgtcctgcccctgaactgctgggcggaccttccgtgttcctgttccccccaaagcccaaggacaccctgatgatctcccggacccccgaagtgacctgcgtggtggtggatgtgtcccacgaggaccctgaagtgaagttcaattggtacgtggacggcgtggaagtgcacaacgccaagaccaagcctagagaggaacagtacaactccacctaccgggtggtgtccgtgctgaccgtgctgcaccaggattggctgaacggcaaagagtacaagtgcaaggtgtccaacaaggccctgcctgcccccatcgaaaagaccatctccaaggccaagggccagccccgggaaccccaggtgtacacactgccccctagcagggacgagctgaccaagaaccaggtgtccctgacctgtctcgtgaaaggcttctacccctccgatatcgccgtggaatgggagtccaacggccagcctgagaacaactacaagaccaccccccctgtgctggactccgacggctcattcttcctgtacagcaagctgacagtggacaagtcccggtggcagcagggcaacgtgttctcctgctccgtgatgcacgaggccctgcacaaccactacacccagaagtccctgtccctgagccccggcaagtgatga

SEQ ID NO: 370 - protein, 11 aa, Homo Sapien
QSLLHSNEYNY

SEQ ID NO: 371 - protein, 3 aa, Homo Sapien
LGS

SEQ ID NO: 372 - protein, 9 aa, Homo Sapien
MQSLQTPLT

SEQ ID NO: 373 - protein, 112 aa, Homo Sapien
DIVMTQSPLSLPVTPGEPASISCRSSQSLLHSNEYNYLDWYLQKPGQSPQLLIFLGSNRASGVPDRFSGSGSGTDFTLKITRVEAEDVGIYYCMQSLQTPLTFGGGTKVEIK

SEQ ID NO: 374 - DNA, 336 bp, Homo Sapien
gatattgtgatgactcagtctccactctccctgcccgtcacccctggagagccggcctccatctcctgcaggtctagtcagagcctcctgcatagtaatgaatacaactatttggattggtacctgcagaagccagggcagtctccacagctcctgatctttttgggttctaatcgggcctccggggtccctgacaggttcagtggcagtggatcaggcacagattttacactgaaaatcaccagagtggaggctgaggatgttggaatttattactgcatgcaatctctacaaactccgctcactttcggcggagggaccaaggtggagatcaaa

SEQ ID NO: 375 - protein, 219 aa, Homo Sapien
DIVMTQSPLSLPVTPGEPASISCRSSQSLLHSNEYNYLDWYLQKPGQSPQLLIFLGSNRASGVPDRFSGSGSGTDFTLKITRVEAEDVGIYYCMQSLQTPLTFGGGTKVEIKRTVAAPSVFIFPPSDEQLKSGTASVVCLLNNFYPREAKVQWKVDNALQSGNSQESVTEQDSKDSTYSLSSTLTLSKADYEKHKVYACEVTHQGLSSPVTKSFNRGEC

SEQ ID NO: 376 - DNA, 657 bp, Homo Sapien
gatattgtgatgactcagtctccactctccctgcccgtcacccctggagagccggcctccatctcctgcaggtctagtcagagcctcctgcatagtaatgaatacaactatttggattggtacctgcagaagccagggcagtctccacagctcctgatctttttgggttctaatcgggcctccggggtccctgacaggttcagtggcagtggatcaggcacagattttacactgaaaatcaccagagtggaggctgaggatgttggaatttattactgcatgcaatctctacaaactccgctcactttcggcggagggaccaaggtggagatcaaacgtacggtggccgctccctccgtgttcatcttcccaccttccgacgagcagctgaagtccggcaccgcttctgtcgtgtgcctgctgaacaacttctacccccgcgaggccaaggtgcagtggaaggtggacaacgccctgcagtccggcaactcccaggaatccgtgaccgagcaggactccaaggacagcacctactccctgtcctccaccctgaccctgtccaaggccgactacgagaagcacaaggtgtacgcctgcgaagtgacccaccagggcctgtctagccccgtgaccaagtctttcaaccggggcgagtgt

SEQ ID NO: 377 - protein, 8 aa, Homo Sapien
GYTFTSYG

SEQ ID NO: 378 - protein, 8 aa, Homo Sapien
ISAYNGNT

SEQ ID NO: 379 - protein, 17 aa, Homo Sapien
ARSTYFYGSGTLYGMDV

SEQ ID NO: 380 - protein, 124 aa, Homo Sapien
QVQLVQSGGEVKKPGASVKVSCKASGYTFTSYGFSWVRQAPGQGLEWMGWISAYNGNTNYAQKLQGRVTMTTDTSTSTAYMELRSLRSDDTAVYYCARSTYFYGSGTLYGMDVWGQGTTVTVSS

SEQ ID NO: 381 - DNA, 372 bp, Homo Sapien
caggttcaactggtgcagtctggaggtgaggtgaagaagcctggggcctcagtgaaggtctcctgcaaggcttctggttacacctttaccagctatggtttcagctgggtgcgacaggcccctggacaaggactagagtggatgggatggatcagcgcttacaatggtaacacaaactatgcacagaagctccagggcagagtcaccatgaccacagacacatccacgagcacagcctacatggagctgaggagcttgagatctgacgacacggccgtgtattactgtgcgagatctacgtatttctatggttcggggaccctctacggtatggacgtctggggccaagggaccacggtcaccgtctcctca

SEQ ID NO: 382 - protein, 454 aa, Homo Sapien
QVQLVQSGGEVKKPGASVKVSCKASGYTFTSYGFSWVRQAPGQGLEWMGWISAYNGNTNYAQKLQGRVTMTTDTSTSTAYMELRSLRSDDTAVYYCARSTYFYGSGTLYGMDVWGQGTTVTVSSASTKGPSVFPLAPSSKSTSGGTAALGCLVKDYFPEPVTVSWNSGALTSGVHTFPAVLQSSGLYSLSSVVTVPSSSLGTQTYICNVNHKPSNTKVDKKVEPKSCDKTHTCPPCPAPELLGGPSVFLFPPKPKDTLMISRTPEVTCVVVDVSHEDPEVKFNWYVDGVEVHNAKTKPREEQYNSTYRVVSVLTVLHQDWLNGKEYKCKVSNKALPAPIEKTISKAKGQPREPQVYTLPPSRDELTKNQVSLTCLVKGFYPSDIAVEWESNGQPENNYKTTPPVLDSDGSFFLYSKLTVDKSRWQQGNVFSCSVMHEALHNHYTQKSLSLSPGK

SEQ ID NO: 383 - DNA, 1368 bp, Homo Sapien
caggttcaactggtgcagtctggaggtgaggtgaagaagcctggggcctcagtgaaggtctcctgcaaggcttctggttacacctttaccagctatggtttcagctgggtgcgacaggcccctggacaaggactagagtggatgggatggatcagcgcttacaatggtaacacaaactatgcacagaagctccagggcagagtcaccatgaccacagacacatccacgagcacagcctacatggagctgaggagcttgagatctgacgacacggccgtgtattactgtgcgagatctacgtatttctatggttcggggaccctctacggtatggacgtctggggccaagggaccacggtcaccgtctcctcagccagcaccaagggcccctctgtgttccctctggccccttccagcaagtccacctctggcggaacagccgctctgggctgcctcgtgaaggactacttccccgagcctgtgaccgtgtcctggaactctggcgctctgaccagcggagtgcacaccttccctgctgtgctgcagtcctccggcctgtactccctgtcctccgtcgtgaccgtgccttccagctctctgggcacccagacctacatctgcaacgtgaaccacaagccctccaacaccaaggtggacaagaaggtggaacccaagtcctgcgacaagacccacacctgtcccccttgtcctgcccctgaactgctgggcggaccttccgtgttcctgttccccccaaagcccaaggacaccctgatgatctcccggacccccgaagtgacctgcgtggtggtggatgtgtcccacgaggaccctgaagtgaagttcaattggtacgtggacggcgtggaagtgcacaacgccaagaccaagcctagagaggaacagtacaactccacctaccgggtggtgtccgtgctgaccgtgctgcaccaggattggctgaacggcaaagagtacaagtgcaaggtgtccaacaaggccctgcctgcccccatcgaaaagaccatctccaaggccaagggccagccccgggaaccccaggtgtacacactgccccctagcagggacgagctgaccaagaaccaggtgtccctgacctgtctcgtgaaaggcttctacccctccgatatcgccgtggaatgggagtccaacggccagcctgagaacaactacaagaccaccccccctgtgctggactccgacggctcattcttcctgtacagcaagctgacagtggacaagtcccggtggcagcagggcaacgtgttctcctgctccgtgatgcacgaggccctgcacaaccactacacccagaagtccctgtccctgagccccggcaagtgatga

SEQ ID NO: 384 - protein, 11 aa, Homo Sapien
QSLLHSDGYNY

SEQ ID NO: 385 - protein, 3 aa, Homo Sapien
LGS

SEQ ID NO: 386 - protein, 9 aa, Homo Sapien
MQALQTPLS

SEQ ID NO: 387 - protein, 112 aa, Homo Sapien
DIVMTQSPLSLPVTPGEPASISCRSSQSLLHSDGYNYLDWYLQKPGQSPQLLIYLGSTRASGFPDRFSGSGSGTDFTLKISRVEAEDVGVYYCMQALQTPLSFGQGTKLEIK

SEQ ID NO: 388 - DNA, 336 bp, Homo Sapien
gatattgtgatgactcagtctccactctccctgcccgtcacccctggagagccggcctccatctcctgcaggtctagtcagagcctcctgcatagtgatggatacaactgtttggattggtacctgcagaagccagggcagtctccacagctcctgatctatttgggttctactcgggcctccgggttccctgacaggttcagtggcagtggatcaggcacagattttacactgaaaatcagcagagtggaggctgaggatgttggggtttattactgcatgcaagctctacaaactccgtgcagttttggccaggggaccaagctggagatcaaa

SEQ ID NO: 389 - protein, 219 aa, Homo Sapien
DIVMTQSPLSLPVTPGEPASISCRSSQSLLHSDGYNYLDWYLQKPGQSPQLLIYLGSTRASGFPDRFSGSGSGTDFTLKISRVEAEDVGVYYCMQALQTPLSFGQGTKLEIKRTVAAPSVFIFPPSDEQLKSGTASVVCLLNNFYPREAKVQWKVDNALQSGNSQESVTEQDSKDSTYSLSSTLTLSKADYEKHKVYACEVTHQGLSSPVTKSFNRGEC

SEQ ID NO: 390 - DNA, 657 bp, Homo Sapien
gatattgtgatgactcagtctccactctccctgcccgtcacccctggagagccggcctccatctcctgcaggtctagtcagagcctcctgcatagtgatggatacaactgtttggattggtacctgcagaagccagggcagtctccacagctcctgatctatttgggttctactcgggcctccgggttccctgacaggttcagtggcagtggatcaggcacagattttacactgaaaatcagcagagtggaggctgaggatgttggggtttattactgcatgcaagctctacaaactccgtgcagttttggccaggggaccaagctggagatcaaacgtacggtggccgctccctccgtgttcatcttcccaccttccgacgagcagctgaagtccggcaccgcttctgtcgtgtgcctgctgaacaacttctacccccgcgaggccaaggtgcagtggaaggtggacaacgccctgcagtccggcaactcccaggaatccgtgaccgagcaggactccaaggacagcacctactccctgtcctccaccctgaccctgtccaaggccgactacgagaagcacaaggtgtacgcctgcgaagtgacccaccagggcctgtctagccccgtgaccaagtctttcaaccggggcgagtgt

SEQ ID NO: 391 - protein, 8 aa, Homo Sapien
GYTFTSYG

SEQ ID NO: 392 - protein, 8 aa, Homo Sapien
ISAYNGNT

SEQ ID NO: 393 - protein, 17 aa, Homo Sapien
ARSTYFYGSGTLYGMDV

SEQ ID NO: 394 - protein, 124 aa, Homo Sapien; identical to SEQ ID NO: 380

SEQ ID NO: 395 - DNA, 372 bp, Homo Sapien; identical to SEQ ID NO: 381

SEQ ID NO: 396 - protein, 454 aa, Homo Sapien; identical to SEQ ID NO: 382

SEQ ID NO: 397 - DNA, 1368 bp, Homo Sapien; identical to SEQ ID NO: 383

SEQ ID NO: 398 - protein, 11 aa, Homo Sapien
QSLLHSDGYNC

SEQ ID NO: 399 - protein, 3 aa, Homo Sapien
LGS

SEQ ID NO: 400 - protein, 9 aa, Homo Sapien
MQALQTPCS

SEQ ID NO: 401 - protein, 112 aa, Homo Sapien
DIVMTQSPLSLPVTPGEPASISCRSSQSLLHSDGYNCLDWYLQKPGQSPQLLIYLGSTRASGFPDRFSGSGSGTDFTLKISRVEAEDVGVYYCMQALQTPCSFGQGTKLEIK

SEQ ID NO: 402 - DNA, 336 bp, Homo Sapien; identical to SEQ ID NO: 388

SEQ ID NO: 403 - protein, 219 aa, Homo Sapien
DIVMTQSPLSLPVTPGEPASISCRSSQSLLHSDGYNCLDWYLQKPGQSPQLLIYLGSTRASGFPDRFSGSGSGTDFTLKISRVEAEDVGVYYCMQALQTPCSFGQGTKLEIKRTVAAPSVFIFPPSDEQLKSGTASVVCLLNNFYPREAKVQWKVDNALQSGNSQESVTEQDSKDSTYSLSSTLTLSKADYEKHKVYACEVTHQGLSSPVTKSFNRGEC

SEQ ID NO: 404 - DNA, 657 bp, Homo Sapien; identical to SEQ ID NO: 390

SEQ ID NO: 405 - protein, 8 aa, Homo Sapien
GVTFDDYG

SEQ ID NO: 406 - protein, 8 aa, Homo Sapien
INWNGGDT

SEQ ID NO: 407 - protein, 17 aa, Homo Sapien
ARDFYGSGSYYHVPFDY

SEQ ID NO: 408 - protein, 124 aa, Homo Sapien
EVQLVESGGGVVRPGGSLRLSCVASGVTFDDYGMSWVRQAPGKGLEWVSGINWNGGDTDYSDSVKGRFTISRDNAKNSLYLQMNSLRAEDTALYYCARDFYGSGSYYHVPFDYWGQGILVTVSS

SEQ ID NO: 409 - DNA, 372 bp, Homo Sapien
gaggtgcagctggtggagtctgggggaggtgtggtacggcctggggggtccctgagactctcctgtgtagcctctggagtcacctttgatgattatggcatgagctgggtccgccaagctccagggaaggggctggartgggtctctggtattaattggaatggtggcgacacagattattcagactctgtgaagggccgattcaccatctccagagacaacgccaagaactccctgtatctacaaatgaatagtctgagagccgaggacacggccttgtattactgtgcgagggatttctatggttcggggagttattatcacgttccttttgactactggggccagggaatcctggtcaccgtctcctca

SEQ ID NO: 410 - protein, 454 aa, Homo Sapien
EVQLVESGGGVVRPGGSLRLSCVASGVTFDDYGMSWVRQAPGKGLEWVSGINWNGGDTDYSDSVKGRFTISRDNAKNSLYLQMNSLRAEDTALYYCARDFYGSGSYYHVPFDYWGQGILVTVSSASTKGPSVFPLAPSSKSTSGGTAALGCLVKDYFPEPVTVSWNSGALTSGVHTFPAVLQSSGLYSLSSVVTVPSSSLGTQTYICNVNHKPSNTKVDKKVEPKSCDKTHTCPPCPAPELLGGPSVFLFPPKPKDTLMISRTPEVTCVVVDVSHEDPEVKFNWYVDGVEVHNAKTKPREEQYNSTYRVVSVLTVLHQDWLNGKEYKCKVSNKALPAPIEKTISKAKGQPREPQVYTLPPSRDELTKNQVSLTCLVKGFYPSDIAVEWESNGQPENNYKTTPPVLDSDGSFFLYSKLTVDKSRWQQGNVFSCSVMHEALHNHYTQKSLSLSPGK

SEQ ID NO: 411 - DNA, 1368 bp, Homo Sapien
gaggtgcagctggtggagtctgggggaggtgtggtacggcctggggggtccctgagactctcctgtgtagcctctggagtcacctttgatgattatggcatgagctgggtccgccaagctccagggaaggggctggartgggtctctggtattaattggaatggtggcgacacagattattcagactctgtgaagggccgattcaccatctccagagacaacgccaagaactccctgtatctacaaatgaatagtctgagagccgaggacacggccttgtattactgtgcgagggatttctatggttcggggagttattatcacgttccttttgactactggggccagggaatcctggtcaccgtctcctcagccagcaccaagggcccctctgtgttccctctggccccttccagcaagtccacctctggcggaacagccgctctgggctgcctcgtgaaggactacttccccgagcctgtgaccgtgtcctggaactctggcgctctgaccagcggagtgcacaccttccctgctgtgctgcagtcctccggcctgtactccctgtcctccgtcgtgaccgtgccttccagctctctgggcacccagacctacatctgcaacgtgaaccacaagccctccaacaccaaggtggacaagaaggtggaacccaagtcctgcgacaagacccacacctgtcccccttgtcctgcccctgaactgctgggcggaccttccgtgttcctgttccccccaaagcccaaggacaccctgatgatctcccggacccccgaagtgacctgcgtggtggtggatgtgtcccacgaggaccctgaagtgaagttcaattggtacgtggacggcgtggaagtgcacaacgccaagaccaagcctagagaggaacagtacaactccacctaccgggtggtgtccgtgctgaccgtgctgcaccaggattggctgaacggcaaagagtacaagtgcaaggtgtccaacaaggccctgcctgcccccatcgaaaagaccatctccaaggccaagggccagccccgggaaccccaggtgtacacactgccccctagcagggacgagctgaccaagaaccaggtgtccctgacctgtctcgtgaaaggcttctacccctccgatatcgccgtggaatgggagtccaacggccagcctgagaacaactacaagaccaccccccctgtgctggactccgacggctcattcttcctgtacagcaagctgacagtggacaagtcccggtggcagcagggcaacgtgttctcctgctccgtgatgcacgaggccctgcacaaccactacacccagaagtccctgtccctgagccccggcaagtgatga

SEQ ID NO: 412 - protein, 7 aa, Homo Sapien
QSVSRSY

SEQ ID NO: 413 - protein, 3 aa, Homo Sapien
GAS

SEQ ID NO: 414 - protein, 9 aa, Homo Sapien
HQYDMSPFT

SEQ ID NO: 415 - protein, 108 aa, Homo Sapien
EIVLTQSPGTLSLSPGERATLSCRASQSVSRSYLAWYQQKRGQAPRLLIYGASSRATGIPDRFSGDGSGTDFTLSISRLEPEDFAVYYCHQYDMSPFTFGPGTKVDIK

SEQ ID NO: 416 - DNA, 324 bp, Homo Sapien
gaaattgtgttgacgcagtctccagggaccctgtctttgtctccaggggaaagagccaccctctcctgcagggccagtcagagtgttagcagaagctacttagcctggtaccagcagaaacgtggccaggctcccaggctcctcatctatggtgcatccagcagggccactggcatcccagacaggttcagtggcgatgggtctgggacagacttcactctctccatcagcagactggagcctgaagattttgcagtgtattactgtcaccagtatgatatgtcaccattcactttcggccctgggaccaaagtggatatcaaa

SEQ ID NO: 417 - protein, 215 aa, Homo Sapien
EIVLTQSPGTLSLSPGERATLSCRASQSVSRSYLAWYQQKRGQAPRLLIYGASSRATGIPDRFSGDGSGTDFTLSISRLEPEDFAVYYCHQYDMSPFTFGPGTKVDIKRTVAAPSVFIFPPSDEQLKSGTASVVCLLNNFYPREAKVQWKVDNALQSGNSQESVTEQDSKDSTYSLSSTLTLSKADYEKHKVYACEVTHQGLSSPVTKSFNRGEC

SEQ ID NO: 418 - DNA, 645 bp, Homo Sapien
gaaattgtgttgacgcagtctccagggaccctgtctttgtctccaggggaaagagccaccctctcctgcagggccagtcagagtgttagcagaagctacttagcctggtaccagcagaaacgtggccaggctcccaggctcctcatctatggtgcatccagcagggccactggcatcccagacaggttcagtggcgatgggtctgggacagacttcactctctccatcagcagactggagcctgaagattttgcagtgtattactgtcaccagtatgatatgtcaccattcactttcggccctgggaccaaagtggatatcaaacgtacggtggccgctccctccgtgttcatcttcccaccttccgacgagcagctgaagtccggcaccgcttctgtcgtgtgcctgctgaacaacttctacccccgcgaggccaaggtgcagtggaaggtggacaacgccctgcagtccggcaactcccaggaatccgtgaccgagcaggactccaaggacagcacctactccctgtcctccaccctgaccctgtccaaggccgactacgagaagcacaaggtgtacgcctgcgaagtgacccaccagggcctgtctagccccgtgaccaagtctttcaaccggggcgagtgt

SEQ ID NO: 419 - protein, 8 aa, Homo Sapien
GLTFDDYG

SEQ ID NO: 420 - protein, 8 aa, Homo Sapien
INWNGDNT

SEQ ID NO: 421 - protein, 17 aa, Homo Sapien
ARDYYGSGSYYNVPFDY

SEQ ID NO: 422 - protein, 124 aa, Homo Sapien
EVQLVESGGGVVRPGGSLRLSCAASGLTFDDYGMSWVRQVPGKGLEWVSGINWNGDNTDYADSVKGRFTISRDNAKNSLYLQMNSLRAEDTALYYCARDYYGSGSYYNVPFDYWGQGTLVTVSS

SEQ ID NO: 423 - DNA, 372 bp, Homo Sapien
gaggtgcagctggtggagtctgggggaggtgtggtacggcctggggggtccctgagactctcctgtgcagcctctggactcacctttgatgattatggcatgagctgggtccgccaagttccagggaaggggctggagtgggtctctggtattaattggaatggtgataacacagattatgcagactctgtgaagggccgattcaccatctccagagacaacgccaagaactccctgtatctgcaaatgaacagtctgagagccgaggacacggccttgtattactgtgcgagggattactatggttcggggagttattataacgttccttttgactactggggccagggaaccctggtcaccgtctcctca

SEQ ID NO: 424 - protein, 454 aa, Homo Sapien
EVQLVESGGGVVRPGGSLRLSCAASGLTFDDYGMSWVRQVPGKGLEWVSGINWNGDNTDYADSVKGRFTISRDNAKNSLYLQMNSLRAEDTALYYCARDYYGSGSYYNVPFDYWGQGTLVTVSSASTKGPSVFPLAPSSKSTSGGTAALGCLVKDYFPEPVTVSWNSGALTSGVHTFPAVLQSSGLYSLSSVVTVPSSSLGTQTYICNVNHKPSNTKVDKKVEPKSCDKTHTCPPCPAPELLGGPSVFLFPPKPKDTLMISRTPEVTCVVVDVSHEDPEVKFNWYVDGVEVHNAKTKPREEQYNSTYRVVSVLTVLHQDWLNGKEYKCKVSNKALPAPIEKTISKAKGQPREPQVYTLPPSRDELTKNQVSLTCLVKGFYPSDIAVEWESNGQPENNYKTTPPVLDSDGSFFLYSKLTVDKSRWQQGNVFSCSVMHEALHNHYTQKSLSLSPGK

SEQ ID NO: 425 - DNA, 1368 bp, Homo Sapien
gaggtgcagctggtggagtctgggggaggtgtggtacggcctggggggtccctgagactctcctgtgcagcctctggactcacctttgatgattatggcatgagctgggtccgccaagttccagggaaggggctggagtgggtctctggtattaattggaatggtgataacacagattatgcagactctgtgaagggccgattcaccatctccagagacaacgccaagaactccctgtatctgcaaatgaacagtctgagagccgaggacacggccttgtattactgtgcgagggattactatggttcggggagttattataacgttccttttgactactggggccagggaaccctggtcaccgtctcctcagccagcaccaagggcccctctgtgttccctctggccccttccagcaagtccacctctggcggaacagccgctctgggctgcctcgtgaaggactacttccccgagcctgtgaccgtgtcctggaactctggcgctctgaccagcggagtgcacaccttccctgctgtgctgcagtcctccggcctgtactccctgtcctccgtcgtgaccgtgccttccagctctctgggcacccagacctacatctgcaacgtgaaccacaagccctccaacaccaaggtggacaagaaggtggaacccaagtcctgcgacaagacccacacctgtcccccttgtcctgcccctgaactgctgggcggaccttccgtgttcctgttccccccaaagcccaaggacaccctgatgatctcccggacccccgaagtgacctgcgtggtggtggatgtgtcccacgaggaccctgaagtgaagttcaattggtacgtggacggcgtggaagtgcacaacgccaagaccaagcctagagaggaacagtacaactccacctaccgggtggtgtccgtgctgaccgtgctgcaccaggattggctgaacggcaaagagtacaagtgcaaggtgtccaacaaggccctgcctgcccccatcgaaaagaccatctccaaggccaagggccagccccgggaaccccaggtgtacacactgccccctagcagggacgagctgaccaagaaccaggtgtccctgacctgtctcgtgaaaggcttctacccctccgatatcgccgtggaatgggagtccaacggccagcctgagaacaactacaagaccaccccccctgtgctggactccgacggctcattcttcctgtacagcaagctgacagtggacaagtcccggtggcagcagggcaacgtgttctcctgctccgtgatgcacgaggccctgcacaaccactacacccagaagtccctgtccctgagccccggcaagtgatga

SEQ ID NO: 426 - protein, 7 aa, Homo Sapien
QSVSSSY

SEQ ID NO: 427 - protein, 3 aa, Homo Sapien
GAS

SEQ ID NO: 428 - protein, 8 aa, Homo Sapien
QQYGSSPF

SEQ ID NO: 429 - protein, 107 aa, Homo Sapien
EIVLTQSPGTLSLSPGERATLSCRASQSVSSSYLAWYQQKPGQAPRLLIYGASSRATGIPDRFSGSGSGTDFTLTIRRLEPEDFAVYYCQQYGSSPFFGPGTKVDIK

SEQ ID NO: 430 - DNA, 321 bp, Homo Sapien
gaaattgtgttgacgcagtctccaggcaccctgtctttgtctccaggggaaagagccaccctctcctgcagggccagtcagagtgttagcagcagctacttagcctggtaccagcagaaacctggccaggctcccaggctcctcatatatggtgcatccagcagggccactggcatcccagacaggttcagtggcagtgggtctgggacagacttcactctcaccatcagaagactggagcctgaagattttgcagtgtattactgtcagcagtatggtagttcaccattcttcggccctgggaccaaagtggatatcaaa

SEQ ID NO: 431 - DNA, 323 bp, Homo Sapien
gaaattgtgttgacgcagtctccaggcaccctgtctttgtctccaggggaaagagccaccctctcctgcagggccagtcagagtgttagcagcagctacttagcctggtaccagcagaaacctggccaggctcccaggctcctcatatatggtgcatccagcagggccactggcatcccagacaggttcagtggcagtgggtctgggacagacttcactctcaccatcagaagactggagcctgaagattttgcagtgtattactgtcagcagtatggtagttcaccattcacttcggccctgggaccaaagtggatatcaaa

SEQ ID NO: 432 - protein, 214 aa, Homo Sapien
EIVLTQSPGTLSLSPGERATLSCRASQSVSSSYLAWYQQKPGQAPRLLIYGASSRATGIPDRFSGSGSGTDFTLTIRRLEPEDFAVYYCQQYGSSPFFGPGTKVDIKRTVAAPSVFIFPPSDEQLKSGTASVVCLLNNFYPREAKVQWKVDNALQSGNSQESVTEQDSKDSTYSLSSTLTLSKADYEKHKVYACEVTHQGLSSPVTKSFNRGEC

SEQ ID NO: 433 - DNA, 642 bp, Homo Sapien
gaaattgtgttgacgcagtctccaggcaccctgtctttgtctccaggggaaagagccaccctctcctgcagggccagtcagagtgttagcagcagctacttagcctggtaccagcagaaacctggccaggctcccaggctcctcatatatggtgcatccagcagggccactggcatcccagacaggttcagtggcagtgggtctgggacagacttcactctcaccatcagaagactggagcctgaagattttgcagtgtattactgtcagcagtatggtagttcaccattcttcggccctgggaccaaagtggatatcaaacgtacggtggccgctccctccgtgttcatcttcccaccttccgacgagcagctgaagtccggcaccgcttctgtcgtgtgcctgctgaacaacttctacccccgcgaggccaaggtgcagtggaaggtggacaacgccctgcagtccggcaactcccaggaatccgtgaccgagcaggactccaaggacagcacctactccctgtcctccaccctgaccctgtccaaggccgactacgagaagcacaaggtgtacgcctgcgaagtgacccaccagggcctgtctagccccgtgaccaagtctttcaaccggggcgagtgt

SEQ ID NO: 434 - DNA, 644 bp, Homo Sapien
gaaattgtgttgacgcagtctccaggcaccctgtctttgtctccaggggaaagagccaccctctcctgcagggccagtcagagtgttagcagcagctacttagcctggtaccagcagaaacctggccaggctcccaggctcctcatatatggtgcatccagcagggccactggcatcccagacaggttcagtggcagtgggtctgggacagacttcactctcaccatcagaagactggagcctgaagattttgcagtgtattactgtcagcagtatggtagttcaccattcacttcggccctgggaccaaagtggatatcaaacgtacggtggccgctccctccgtgttcatcttcccaccttccgacgagcagctgaagtccggcaccgcttctgtcgtgtgcctgctgaacaacttctacccccgcgaggccaaggtgcagtggaaggtggacaacgccctgcagtccggcaactcccaggaatccgtgaccgagcaggactccaaggacagcacctactccctgtcctccaccctgaccctgtccaaggccgactacgagaagcacaaggtgtacgcctgcgaagtgacccaccagggcctgtctagccccgtgaccaagtctttcaaccggggcgagtgt

SEQ ID NO: 435 - protein, 8 aa, Homo Sapien
GYTFNSYG

SEQ ID NO: 436 - protein, 8 aa, Homo Sapien
ISVHNGNT

SEQ ID NO: 437 - protein, 17 aa, Homo Sapien
ARAGYDILTDFSDAFDI

SEQ ID NO: 438 - protein, 124 aa, Homo Sapien
QVQLVQSGAEVKKPGASVKVSCKASGYTFNSYGIIWVRQAPGQGLEWMGWISVHNGNTNCAQKLQGRVTMTTDTSTSTAYMELRSLRTDDTAVYYCARAGYDILTDFSDAFDIWGHGTMVTVSS

SEQ ID NO: 439 - DNA, 372 bp, Homo Sapien
caggttcagttggtgcagtctggagctgaggtgaagaagcctggggcctcagtgaaggtctcctgcaaggcttctggttacacctttaatagttatggtatcatctgggtgcgacaggcccctggacaagggcttgagtggatgggatggatcagcgttcacaatggtaacacaaactgtgcacagaagctccagggtagagtcaccatgaccacagacacatccacgagcacagcctacatggagctgaggagcctgagaactgacgacacggccgtgtattactgtgcgagagcgggttacgatattttgactgatttttccgatgcttttgatatctggggccacgggacaatggtcaccgtctcttca

SEQ ID NO: 440 - protein, 454 aa, Homo Sapien
QVQLVQSGAEVKKPGASVKVSCKASGYTFNSYGIIWVRQAPGQGLEWMGWISVHNGNTNCAQKLQGRVTMTTDTSTSTAYMELRSLRTDDTAVYYCARAGYDILTDFSDAFDIWGHGTMVTVSSASTKGPSVFPLAPSSKSTSGGTAALGCLVKDYFPEPVTVSWNSGALTSGVHTFPAVLQSSGLYSLSSVVTVPSSSLGTQTYICNVNHKPSNTKVDKKVEPKSCDKTHTCPPCPAPELLGGPSVFLFPPKPKDTLMISRTPEVTCVVVDVSHEDPEVKFNWYVDGVEVHNAKTKPREEQYNSTYRVVSVLTVLHQDWLNGKEYKCKVSNKALPAPIEKTISKAKGQPREPQVYTLPPSRDELTKNQVSLTCLVKGFYPSDIAVEWESNGQPENNYKTTPPVLDSDGSFFLYSKLTVDKSRWQQGNVFSCSVMHEALHNHYTQKSLSLSPGK

SEQ ID NO: 441 - DNA, 1368 bp, Homo Sapien
caggttcagttggtgcagtctggagctgaggtgaagaagcctggggcctcagtgaaggtctcctgcaaggcttctggttacacctttaatagttatggtatcatctgggtgcgacaggcccctggacaagggcttgagtggatgggatggatcagcgttcacaatggtaacacaaactgtgcacagaagctccagggtagagtcaccatgaccacagacacatccacgagcacagcctacatggagctgaggagcctgagaactgacgacacggccgtgtattactgtgcgagagcgggttacgatattttgactgatttttccgatgcttttgatatctggggccacgggacaatggtcaccgtctcttcagccagcaccaagggcccctctgtgttccctctggccccttccagcaagtccacctctggcggaacagccgctctgggctgcctcgtgaaggactacttccccgagcctgtgaccgtgtcctggaactctggcgctctgaccagcggagtgcacaccttccctgctgtgctgcagtcctccggcctgtactccctgtcctccgtcgtgaccgtgccttccagctctctgggcacccagacctacatctgcaacgtgaaccacaagccctccaacaccaaggtggacaagaaggtggaacccaagtcctgcgacaagacccacacctgtcccccttgtcctgcccctgaactgctgggcggaccttccgtgttcctgttccccccaaagcccaaggacaccctgatgatctcccggacccccgaagtgacctgcgtggtggtggatgtgtcccacgaggaccctgaagtgaagttcaattggtacgtggacggcgtggaagtgcacaacgccaagaccaagcctagagaggaacagtacaactccacctaccgggtggtgtccgtgctgaccgtgctgcaccaggattggctgaacggcaaagagtacaagtgcaaggtgtccaacaaggccctgcctgcccccatcgaaaagaccatctccaaggccaagggccagccccgggaaccccaggtgtacacactgccccctagcagggacgagctgaccaagaaccaggtgtccctgacctgtctcgtgaaaggcttctacccctccgatatcgccgtggaatgggagtccaacggccagcctgagaacaactacaagaccaccccccctgtgctggactccgacggctcattcttcctgtacagcaagctgacagtggacaagtcccggtggcagcagggcaacgtgttctcctgctccgtgatgcacgaggccctgcacaaccactacacccagaagtccctgtccctgagccccggcaagtgatga

SEQ ID NO: 442 - protein, 6 aa, Homo Sapien
QNINNF

SEQ ID NO: 443 - protein, 3 aa, Homo Sapien
AAS

SEQ ID NO: 444 - protein, 8 aa, Homo Sapien
QQSYGIPW

SEQ ID NO: 445 - protein, 106 aa, Homo Sapien
DIQMTQSPSSLSASVGDRVTITCRASQNINNFLNWYQQKEGKGPKLLIYAASSLQRGIPSTFSGSGSGTDFTLTISSLQPEDFATYICQQSYGIPWVGQGTKVEIK

SEQ ID NO: 446 - DNA, 318 bp, Homo Sapien
gacatccagatgacccagtctccatcctccctgtctgcatctgtaggagacagagtcaccatcacttgccgggcaagtcagaacattaataactttttaaattggtatcagcagaaagaagggaaaggccctaagctcctgatctatgcagcatccagtttgcaaagagggataccatcaacgttcagtggcagtggatctgggacagacttcactctcaccatcagcagtctgcaacctgaagattttgcaacttacatctgtcaacagagctacggtatcccgtgggtcggccaagggaccaaggtggaaatcaaa

SEQ ID NO: 447 - protein, 213 aa, Homo Sapien
DIQMTQSPSSLSASVGDRVTITCRASQNINNFLNWYQQKEGKGPKLLIYAASSLQRGIPSTFSGSGSGTDFTLTISSLQPEDFATYICQQSYGIPWVGQGTKVEIKRTVAAPSVFIFPPSDEQLKSGTASVVCLLNNFYPREAKVQWKVDNALQSGNSQESVTEQDSKDSTYSLSSTLTLSKADYEKHKVYACEVTHQGLSSPVTKSFNRGEC

SEQ ID NO: 448 - DNA, 639 bp, Homo Sapien
gacatccagatgacccagtctccatcctccctgtctgcatctgtaggagacagagtcaccatcacttgccgggcaagtcagaacattaataactttttaaattggtatcagcagaaagaagggaaaggccctaagctcctgatctatgcagcatccagtttgcaaagagggataccatcaacgttcagtggcagtggatctgggacagacttcactctcaccatcagcagtctgcaacctgaagattttgcaacttacatctgtcaacagagctacggtatcccgtgggtcggccaagggaccaaggtggaaatcaaacgtacggtggccgctccctccgtgttcatcttcccaccttccgacgagcagctgaagtccggcaccgcttctgtcgtgtgcctgctgaacaacttctacccccgcgaggccaaggtgcagtggaaggtggacaacgccctgcagtccggcaactcccaggaatccgtgaccgagcaggactccaaggacagcacctactccctgtcctccaccctgaccctgtccaaggccgactacgagaagcacaaggtgtacgcctgcgaagtgacccaccagggcctgtctagccccgtgaccaagtctttcaaccggggcgagtgt

SEQ ID NO: 449 - protein, 8 aa, Homo Sapien
GFTFSDYF

SEQ ID NO: 450 - protein, 8 aa, Homo Sapien
ISSSGSTI

SEQ ID NO: 451 - protein, 21 aa, Homo Sapien
ARDHYDGSGIYPLYYYYGLDV

SEQ ID NO: 452 - protein, 128 aa, Homo Sapien
QVQLVESGGGLVKPGGSLRLSCAASGFTFSDYFMSWIRQAPGKGLEWISYISSSGSTIYYADSVRGRFTISRDNAKYSLYLQMNSLRSEDTAVYYCARDHYDGSGIYPLYYYYGLDVWGQGTTVTVSS

SEQ ID NO: 453 - DNA, 384 bp, Homo Sapien
caggtgcagctggtggagtctgggggaggcttggtcaagcctggagggtccctgagactctcctgtgcagcctctggattcaccttcagtgactacttcatgagctggatccgccaggcgccagggaaggggctggagtggatttcatacattagttctagtggtagtaccatatactacgcagactctgtgaggggccgattcaccatctccagggacaacgccaagtactcactgtatctgcaaatgaacagcctgagatccgaggacacggccgtgtattactgtgcgagagatcactacgatggttcggggatttatcccctctactactattacggtttggacgtctggggccaggggaccacggtcaccgtctcctca

SEQ ID NO: 454 - protein, 458 aa, Homo Sapien
QVQLVESGGGLVKPGGSLRLSCAASGFTFSDYFMSWIRQAPGKGLEWISYISSSGSTIYYADSVRGRFTISRDNAKYSLYLQMNSLRSEDTAVYYCARDHYDGSGIYPLYYYYGLDVWGQGTTVTVSSASTKGPSVFPLAPSSKSTSGGTAALGCLVKDYFPEPVTVSWNSGALTSGVHTFPAVLQSSGLYSLSSVVTVPSSSLGTQTYICNVNHKPSNTKVDKKVEPKSCDKTHTCPPCPAPELLGGPSVFLFPPKPKDTLMISRTPEVTCVVVDVSHEDPEVKFNWYVDGVEVHNAKTKPREEQYNSTYRVVSVLTVLHQDWLNGKEYKCKVSNKALPAPIEKTISKAKGQPREPQVYTLPPSRDELTKNQVSLTCLVKGFYPSDIAVEWESNGQPENNYKTTPPVLDSDGSFFLYSKLTVDKSRWQQGNVFSCSVMHEALHNHYTQKSLSLSPGK

SEQ ID NO: 455 - DNA, 1380 bp, Homo Sapien
caggtgcagctggtggagtctgggggaggcttggtcaagcctggagggtccctgagactctcctgtgcagcctctggattcaccttcagtgactacttcatgagctggatccgccaggcgccagggaaggggctggagtggatttcatacattagttctagtggtagtaccatatactacgcagactctgtgaggggccgattcaccatctccagggacaacgccaagtactcactgtatctgcaaatgaacagcctgagatccgaggacacggccgtgtattactgtgcgagagatcactacgatggttcggggatttatcccctctactactattacggtttggacgtctggggccaggggaccacggtcaccgtctcctcagccagcaccaagggcccctctgtgttccctctggccccttccagcaagtccacctctggcggaacagccgctctgggctgcctcgtgaaggactacttccccgagcctgtgaccgtgtcctggaactctggcgctctgaccagcggagtgcacaccttccctgctgtgctgcagtcctccggcctgtactccctgtcctccgtcgtgaccgtgccttccagctctctgggcacccagacctacatctgcaacgtgaaccacaagccctccaacaccaaggtggacaagaaggtggaacccaagtcctgcgacaagacccacacctgtcccccttgtcctgcccctgaactgctgggcggaccttccgtgttcctgttccccccaaagcccaaggacaccctgatgatctcccggacccccgaagtgacctgcgtggtggtggatgtgtcccacgaggaccctgaagtgaagttcaattggtacgtggacggcgtggaagtgcacaacgccaagaccaagcctagagaggaacagtacaactccacctaccgggtggtgtccgtgctgaccgtgctgcaccaggattggctgaacggcaaagagtacaagtgcaaggtgtccaacaaggccctgcctgcccccatcgaaaagaccatctccaaggccaagggccagccccgggaaccccaggtgtacacactgccccctagcagggacgagctgaccaagaaccaggtgtccctgacctgtctcgtgaaaggcttctacccctccgatatcgccgtggaatgggagtccaacggccagcctgagaacaactacaagaccaccccccctgtgctggactccgacggctcattcttcctgtacagcaagctgacagtggacaagtcccggtggcagcagggcaacgtgttctcctgctccgtgatgcacgaggccctgcacaaccactacacccagaagtccctgtccctgagccccggcaagtgatga

SEQ ID NO: 456 - protein, 11 aa, Homo Sapien
QSLLHSNGYNY

SEQ ID NO: 457 - protein, 3 aa, Homo Sapien
LGS

SEQ ID NO: 458 - protein, 9 aa, Homo Sapien
MQALQTPRS

SEQ ID NO: 459 - protein, 111 aa, Homo Sapien
IVMTQSPLSLPVTPGEPASISCRSSQSLLHSNGYNYLDYYLQKPGQSPQLLIYLGSYRASGVPDRFSGSGSGTDFTLKISRVEAEDVGVYYCMQALQTPRSFGQGTTLEIK

SEQ ID NO: 460 - DNA, 333 bp, Homo Sapien
attgtgatgactcagtctccactctccctacccgtcacccctggagagccggcctccatctcctgcaggtctagtcagagcctcctgcatagtaatggatacaactatttggattattacctgcagaagccagggcagtctccacagctcctgatctatttgggttcttatcgggcctccggggtccctgacaggttcagtggcagtggatcaggcacagattttacactgaaaatcagcagagtggaggctgaggatgttggggtttattactgcatgcaagctctacaaactcctcgcagttttggccaggggaccacgctggagatcaaa

SEQ ID NO: 461 - protein, 218 aa, Homo Sapien
IVMTQSPLSLPVTPGEPASISCRSSQSLLHSNGYNYLDYYLQKPGQSPQLLIYLGSYRASGVPDRFSGSGSGTDFTLKISRVEAEDVGVYYCMQALQTPRSFGQGTTLEIKRTVAAPSVFIFPPSDEQLKSGTASVVCLLNNFYPREAKVQWKVDNALQSGNSQESVTEQDSKDSTYSLSSTLTLSKADYEKHKVYACEVTHQGLSSPVTKSFNRGEC

SEQ ID NO: 462 - DNA, 654 bp, Homo Sapien
attgtgatgactcagtctccactctccctacccgtcacccctggagagccggcctccatctcctgcaggtctagtcagagcctcctgcatagtaatggatacaactatttggattattacctgcagaagccagggcagtctccacagctcctgatctatttgggttcttatcgggcctccggggtccctgacaggttcagtggcagtggatcaggcacagattttacactgaaaatcagcagagtggaggctgaggatgttggggtttattactgcatgcaagctctacaaactcctcgcagttttggccaggggaccacgctggagatcaaacgtacggtggccgctccctccgtgttcatcttcccaccttccgacgagcagctgaagtccggcaccgcttctgtcgtgtgcctgctgaacaacttctacccccgcgaggccaaggtgcagtggaaggtggacaacgccctgcagtccggcaactcccaggaatccgtgaccgagcaggactccaaggacagcacctactccctgtcctccaccctgaccctgtccaaggccgactacgagaagcacaaggtgtacgcctgcgaagtgacccaccagggcctgtctagccccgtgaccaagtctttcaaccggggcgagtgt

SEQ ID NO: 463 - protein, 10 aa, Homo Sapien
GFSLSTTGVG

SEQ ID NO: 464 - protein, 7 aa, Homo Sapien
IYWDDDK

SEQ ID NO: 465 - protein, 16 aa, Homo Sapien
THGYGSASYYHYGMDV

SEQ ID NO: 466 - protein, 124 aa, Homo Sapien
QITLKESGPTLVKPTQTLTLTCTFSGFSLSTTGVGVGWIRQPPGKALEWLAVIYWDDDKRYSPSLKSRLTITKDTSKNQVVLTMTNMDPVDTATYFCTHGYGSASYYHYGMDVWGQGTTVTVSS

SEQ ID NO: 467 - DNA, 372 bp, Homo Sapien
cagatcaccttgaaggagtctggtcctacgctggtgaaacccacacagaccctcacgctgacctgcaccttctctgggttctcactcagcactactggagtgggtgtgggctggatccgtcagcccccaggaaaggccctggagtggcttgcagtcatttattgggatgatgataagcgctacagcccatctctgaagagcagactcaccatcaccaaggacacctccaaaaaccaggtggtccttacaatgaccaacatggaccctgtggacacagccacatatttctgtacacacggatatggttcggcgagttattaccactacggtatggacgtctggggccaagggaccacggtcaccgtctcctca

SEQ ID NO: 468 - protein, 454 aa, Homo Sapien
QITLKESGPTLVKPTQTLTLTCTFSGFSLSTTGVGVGWIRQPPGKALEWLAVIYWDDDKRYSPSLKSRLTITKDTSKNQVVLTMTNMDPVDTATYFCTHGYGSASYYHYGMDVWGQGTTVTVSSASTKGPSVFPLAPSSKSTSGGTAALGCLVKDYFPEPVTVSWNSGALTSGVHTFPAVLQSSGLYSLSSVVTVPSSSLGTQTYICNVNHKPSNTKVDKKVEPKSCDKTHTCPPCPAPELLGGPSVFLFPPKPKDTLMISRTPEVTCVVVDVSHEDPEVKFNWYVDGVEVHNAKTKPREEQYNSTYRVVSVLTVLHQDWLNGKEYKCKVSNKALPAPIEKTISKAKGQPREPQVYTLPPSRDELTKNQVSLTCLVKGFYPSDIAVEWESNGQPENNYKTTPPVLDSDGSFFLYSKLTVDKSRWQQGNVFSCSVMHEALHNHYTQKSLSLSPGK

SEQ ID NO: 469 - DNA, 1368 bp, Homo Sapien
cagatcaccttgaaggagtctggtcctacgctggtgaaacccacacagaccctcacgctgacctgcaccttctctgggttctcactcagcactactggagtgggtgtgggctggatccgtcagcccccaggaaaggccctggagtggcttgcagtcatttattgggatgatgataagcgctacagcccatctctgaagagcagactcaccatcaccaaggacacctccaaaaaccaggtggtccttacaatgaccaacatggaccctgtggacacagccacatatttctgtacacacggatatggttcggcgagttattaccactacggtatggacgtctggggccaagggaccacggtcaccgtctcctcagccagcaccaagggcccctctgtgttccctctggccccttccagcaagtccacctctggcggaacagccgctctgggctgcctcgtgaaggactacttccccgagcctgtgaccgtgtcctggaactctggcgctctgaccagcggagtgcacaccttccctgctgtgctgcagtcctccggcctgtactccctgtcctccgtcgtgaccgtgccttccagctctctgggcacccagacctacatctgcaacgtgaaccacaagccctccaacaccaaggtggacaagaaggtggaacccaagtcctgcgacaagacccacacctgtcccccttgtcctgcccctgaactgctgggcggaccttccgtgttcctgttccccccaaagcccaaggacaccctgatgatctcccggacccccgaagtgacctgcgtggtggtggatgtgtcccacgaggaccctgaagtgaagttcaattggtacgtggacggcgtggaagtgcacaacgccaagaccaagcctagagaggaacagtacaactccacctaccgggtggtgtccgtgctgaccgtgctgcaccaggattggctgaacggcaaagagtacaagtgcaaggtgtccaacaaggccctgcctgcccccatcgaaaagaccatctccaaggccaagggccagccccgggaaccccaggtgtacacactgccccctagcagggacgagctgaccaagaaccaggtgtccctgacctgtctcgtgaaaggcttctacccctccgatatcgccgtggaatgggagtccaacggccagcctgagaacaactacaagaccaccccccctgtgctggactccgacggctcattcttcctgtacagcaagctgacagtggacaagtcccggtggcagcagggcaacgtgttctcctgctccgtgatgcacgaggccctgcacaaccactacacccagaagtccctgtccctgagccccggcaagtgatga

SEQ ID NO: 470 - protein, 6 aa, Homo Sapien
QSVTNY

SEQ ID NO: 471 - protein, 3 aa, Homo Sapien
DAS

SEQ ID NO: 472 - protein, 9 aa, Homo Sapien
QHRSNWPLT

SEQ ID NO: 473 - protein, 107 aa, Homo Sapien
EIVLTQSPATLSLSPGERATLSCRASQSVTNYLAWHQQKPGQAPRLLIYDASNRATGIPARFSGSGSGTDFTLTISSLEPEDFAVYYCQHRSNWPLTFGGGTKVEIK

SEQ ID NO: 474 - DNA, 322 bp, Homo Sapien
gaaattgtattgacacagtctccagccaccctgtctttgtctccaggggaaagagccaccctctcctgcagggccagtcagagtgttaccaactacttagcctggcaccaacagaaacctggccaggctcccaggctcctcatctatgatgcatccaacagggccactggcatcccagccaggttcagtggcagtgggtctgggacagacttcactctcaccatcagcagcctagagcctgaagattttgcagtttattactgtcagcaccgtagcaactggcctctcactttcggcggagggaccaaggtggagatcaaac

SEQ ID NO: 475 - protein, 214 aa, Homo Sapien
EIVLTQSPATLSLSPGERATLSCRASQSVTNYLAWHQQKPGQAPRLLIYDASNRATGIPARFSGSGSGTDFTLTISSLEPEDFAVYYCQHRSNWPLTFGGGTKVEIKRTVAAPSVFIFPPSDEQLKSGTASVVCLLNNFYPREAKVQWKVDNALQSGNSQESVTEQDSKDSTYSLSSTLTLSKADYEKHKVYACEVTHQGLSSPVTKSFNRGEC

SEQ ID NO: 476 - DNA, 643 bp, Homo Sapien
gaaattgtattgacacagtctccagccaccctgtctttgtctccaggggaaagagccaccctctcctgcagggccagtcagagtgttaccaactacttagcctggcaccaacagaaacctggccaggctcccaggctcctcatctatgatgcatccaacagggccactggcatcccagccaggttcagtggcagtgggtctgggacagacttcactctcaccatcagcagcctagagcctgaagattttgcagtttattactgtcagcaccgtagcaactggcctctcactttcggcggagggaccaaggtggagatcaaaccgtacggtggccgctccctccgtgttcatcttcccaccttccgacgagcagctgaagtccggcaccgcttctgtcgtgtgcctgctgaacaacttctacccccgcgaggccaaggtgcagtggaaggtggacaacgccctgcagtccggcaactcccaggaatccgtgaccgagcaggactccaaggacagcacctactccctgtcctccaccctgaccctgtccaaggccgactacgagaagcacaaggtgtacgcctgcgaagtgacccaccagggcctgtctagccccgtgaccaagtctttcaaccggggcgagtgt

SEQ ID NO: 477 - protein, 10 aa, Homo Sapien
GFSLSTSGVG

SEQ ID NO: 478 - protein, 7 aa, Homo Sapien
IYWDDDK

SEQ ID NO: 479 - protein, 16 aa, Homo Sapien
THGYGSASYYHYGMDV

SEQ ID NO: 480 - protein, 124 aa, Homo Sapien
QITLKESGPTLVKPTQTLTLTCTFSGFSLSTSGVGVGWIRQPPGKALEWLAVIYWDDDKRYSPSLKSRLTITKDTSKNQVVLTMTNMDPVDTATYFCTHGYGSASYYHYGMDVWGQGTTVTVSS

SEQ ID NO: 481 - DNA, 372 bp, Homo Sapien
cagatcaccttgaaggagtctggtcctacgctggtgaaacccacacagaccctcacgctgacctgcaccttctctgggttctcactcagcactagtggagtgggtgtgggctggatccgtcagcccccaggaaaggccctggagtggcttgcagtcatttattgggatgatgataagcgctacagcccatctctgaagagcaggctcaccatcaccaaggacacctccaaaaaccaggtggtccttacaatgaccaacatggaccctgtggacacagccacatatttctgtacacacggatatggttcggcgagttattaccactacggtatggacgtctggggccaagggaccacggtcaccgtctcctca

SEQ ID NO: 482 - protein, 454 aa, Homo Sapien
QITLKESGPTLVKPTQTLTLTCTFSGFSLSTSGVGVGWIRQPPGKALEWLAVIYWDDDKRYSPSLKSRLTITKDTSKNQVVLTMTNMDPVDTATYFCTHGYGSASYYHYGMDVWGQGTTVTVSSASTKGPSVFPLAPSSKSTSGGTAALGCLVKDYFPEPVTVSWNSGALTSGVHTFPAVLQSSGLYSLSSVVTVPSSSLGTQTYICNVNHKPSNTKVDKKVEPKSCDKTHTCPPCPAPELLGGPSVFLFPPKPKDTLMISRTPEVTCVVVDVSHEDPEVKFNWYVDGVEVHNAKTKPREEQYNSTYRVVSVLTVLHQDWLNGKEYKCKVSNKALPAPIEKTISKAKGQPREPQVYTLPPSRDELTKNQVSLTCLVKGFYPSDIAVEWESNGQPENNYKTTPPVLDSDGSFFLYSKLTVDKSRWQQGNVFSCSVMHEALHNHYTQKSLSLSPGK

SEQ ID NO: 483 - DNA, 1368 bp, Homo Sapien
cagatcaccttgaaggagtctggtcctacgctggtgaaacccacacagaccctcacgctgacctgcaccttctctgggttctcactcagcactagtggagtgggtgtgggctggatccgtcagcccccaggaaaggccctggagtggcttgcagtcatttattgggatgatgataagcgctacagcccatctctgaagagcaggctcaccatcaccaaggacacctccaaaaaccaggtggtccttacaatgaccaacatggaccctgtggacacagccacatatttctgtacacacggatatggttcggcgagttattaccactacggtatggacgtctggggccaagggaccacggtcaccgtctcctcagccagcaccaagggcccctctgtgttccctctggccccttccagcaagtccacctctggcggaacagccgctctgggctgcctcgtgaaggactacttccccgagcctgtgaccgtgtcctggaactctggcgctctgaccagcggagtgcacaccttccctgctgtgctgcagtcctccggcctgtactccctgtcctccgtcgtgaccgtgccttccagctctctgggcacccagacctacatctgcaacgtgaaccacaagccctccaacaccaaggtggacaagaaggtggaacccaagtcctgcgacaagacccacacctgtcccccttgtcctgcccctgaactgctgggcggaccttccgtgttcctgttccccccaaagcccaaggacaccctgatgatctcccggacccccgaagtgacctgcgtggtggtggatgtgtcccacgaggaccctgaagtgaagttcaattggtacgtggacggcgtggaagtgcacaacgccaagaccaagcctagagaggaacagtacaactccacctaccgggtggtgtccgtgctgaccgtgctgcaccaggattggctgaacggcaaagagtacaagtgcaaggtgtccaacaaggccctgcctgcccccatcgaaaagaccatctccaaggccaagggccagccccgggaaccccaggtgtacacactgccccctagcagggacgagctgaccaagaaccaggtgtccctgacctgtctcgtgaaaggcttctacccctccgatatcgccgtggaatgggagtccaacggccagcctgagaacaactacaagaccaccccccctgtgctggactccgacggctcattcttcctgtacagcaagctgacagtggacaagtcccggtggcagcagggcaacgtgttctcctgctccgtgatgcacgaggccctgcacaaccactacacccagaagtccctgtccctgagccccggcaagtgatga

SEQ ID NO: 484 - protein, 6 aa, Homo Sapien
QSVTNY

SEQ ID NO: 485 - protein, 3 aa, Homo Sapien
DAS

SEQ ID NO: 486 - protein, 9 aa, Homo Sapien
QQRSNWPLT

SEQ ID NO: 487 - protein, 107 aa, Homo Sapien
EIVLTQSPATLSLSPGERATLSCRASQSVTNYLAWHQQKPGQAPRLLIYDASNRATGIPARFSGSGSGTDFTLTISSLEPEDFAVYYCQQRSNWPLTFGGGTKVEIK

SEQ ID NO: 488 - DNA, 321 bp, Homo Sapien
gaaattgtgttgacacagtctccagccaccctgtctttgtctccaggggaaagagccaccctctcctgcagggccagtcagagtgttaccaactacttagcctggcaccaacagaaacctggccaggctcccaggctcctcatctatgatgcatccaacagggccactggcatcccagccaggttcagtggcagtgggtctgggacagacttcactctcaccatcagcagcctagagcctgaagattttgcagtttattactgtcagcagcgtagcaactggcctctcactttcggcggagggaccaaggtggagatcaaa

SEQ ID NO: 489 - protein, 214 aa, Homo Sapien
EIVLTQSPATLSLSPGERATLSCRASQSVTNYLAWHQQKPGQAPRLLIYDASNRATGIPARFSGSGSGTDFTLTISSLEPEDFAVYYCQQRSNWPLTFGGGTKVEIKRTVAAPSVFIFPPSDEQLKSGTASVVCLLNNFYPREAKVQWKVDNALQSGNSQESVTEQDSKDSTYSLSSTLTLSKADYEKHKVYACEVTHQGLSSPVTKSFNRGEC

SEQ ID NO: 490 - DNA, 642 bp, Homo Sapien
gaaattgtgttgacacagtctccagccaccctgtctttgtctccaggggaaagagccaccctctcctgcagggccagtcagagtgttaccaactacttagcctggcaccaacagaaacctggccaggctcccaggctcctcatctatgatgcatccaacagggccactggcatcccagccaggttcagtggcagtgggtctgggacagacttcactctcaccatcagcagcctagagcctgaagattttgcagtttattactgtcagcagcgtagcaactggcctctcactttcggcggagggaccaaggtggagatcaaacgtacggtggccgctccctccgtgttcatcttcccaccttccgacgagcagctgaagtccggcaccgcttctgtcgtgtgcctgctgaacaacttctacccccgcgaggccaaggtgcagtggaaggtggacaacgccctgcagtccggcaactcccaggaatccgtgaccgagcaggactccaaggacagcacctactccctgtcctccaccctgaccctgtccaaggccgactacgagaagcacaaggtgtacgcctgcgaagtgacccaccagggcctgtctagccccgtgaccaagtctttcaaccggggcgagtgt

SEQ ID NO: 491 - protein, 8 aa, Homo Sapien
GFTFSDYY

SEQ ID NO: 492 - protein, 8 aa, Homo Sapien
ISSSGSTI

SEQ ID NO: 493 - protein, 20 aa, Homo Sapien
ARDFYDILTDSPYFYYGVDV

SEQ ID NO: 494 - protein, 127 aa, Homo Sapien
QVQLVESGGGLVKPGGSLRLSCAASGFTFSDYYMSWIRQAPGKGLEWVSYISSSGSTIYYADSVKGRFTISRDNAKNSLYLQINSLRAEDTAVYYCARDFYDILTDSPYFYYGVDVWGQGTTVTVSS

SEQ ID NO: 495 - DNA, 381 bp, Homo Sapien
caggtgcagctggtggagtctgggggaggcttggtcaagcctggagggtccctgagactctcctgtgcagcctctggattcaccttcagtgactactacatgagctggatccgccaggctccagggaaggggctggagtgggtttcatacattagtagtagtggtagtaccatatactacgcagactctgtgaagggccgattcaccatctccagggacaacgccaagaactcactgtatctgcaaattaacagcctgagagccgaggacacggccgtgtattactgtgcgagagatttttacgatattttgactgatagtccgtacttctactacggtgtggacgtctggggccaagggaccacggtcaccgtctcctca

SEQ ID NO: 496 - protein, 457 aa, Homo Sapien
QVQLVESGGGLVKPGGSLRLSCAASGFTFSDYYMSWIRQAPGKGLEWVSYISSSGSTIYYADSVKGRFTISRDNAKNSLYLQINSLRAEDTAVYYCARDFYDILTDSPYFYYGVDVWGQGTTVTVSSASTKGPSVFPLAPSSKSTSGGTAALGCLVKDYFPEPVTVSWNSGALTSGVHTFPAVLQSSGLYSLSSVVTVPSSSLGTQTYICNVNHKPSNTKVDKKVEPKSCDKTHTCPPCPAPELLGGPSVFLFPPKPKDTLMISRTPEVTCVVVDVSHEDPEVKFNWYVDGVEVHNAKTKPREEQYNSTYRVVSVLTVLHQDWLNGKEYKCKVSNKALPAPIEKTISKAKGQPREPQVYTLPPSRDELTKNQVSLTCLVKGFYPSDIAVEWESNGQPENNYKTTPPVLDSDGSFFLYSKLTVDKSRWQQGNVFSCSVMHEALHNHYTQKSLSLSPGK

SEQ ID NO: 497 - DNA, 1377 bp, Homo Sapien
caggtgcagctggtggagtctgggggaggcttggtcaagcctggagggtccctgagactctcctgtgcagcctctggattcaccttcagtgactactacatgagctggatccgccaggctccagggaaggggctggagtgggtttcatacattagtagtagtggtagtaccatatactacgcagactctgtgaagggccgattcaccatctccagggacaacgccaagaactcactgtatctgcaaattaacagcctgagagccgaggacacggccgtgtattactgtgcgagagatttttacgatattttgactgatagtccgtacttctactacggtgtggacgtctggggccaagggaccacggtcaccgtctcctcagccagcaccaagggcccctctgtgttccctctggccccttccagcaagtccacctctggcggaacagccgctctgggctgcctcgtgaaggactacttccccgagcctgtgaccgtgtcctggaactctggcgctctgaccagcggagtgcacaccttccctgctgtgctgcagtcctccggcctgtactccctgtcctccgtcgtgaccgtgccttccagctctctgggcacccagacctacatctgcaacgtgaaccacaagccctccaacaccaaggtggacaagaaggtggaacccaagtcctgcgacaagacccacacctgtcccccttgtcctgcccctgaactgctgggcggaccttccgtgttcctgttccccccaaagcccaaggacaccctgatgatctcccggacccccgaagtgacctgcgtggtggtggatgtgtcccacgaggaccctgaagtgaagttcaattggtacgtggacggcgtggaagtgcacaacgccaagaccaagcctagagaggaacagtacaactccacctaccgggtggtgtccgtgctgaccgtgctgcaccaggattggctgaacggcaaagagtacaagtgcaaggtgtccaacaaggccctgcctgcccccatcgaaaagaccatctccaaggccaagggccagccccgggaaccccaggtgtacacactgccccctagcagggacgagctgaccaagaaccaggtgtccctgacctgtctcgtgaaaggcttctacccctccgatatcgccgtggaatgggagtccaacggccagcctgagaacaactacaagaccaccccccctgtgctggactccgacggctcattcttcctgtacagcaagctgacagtggacaagtcccggtggcagcagggcaacgtgttctcctgctccgtgatgcacgaggccctgcacaaccactacacccagaagtccctgtccctgagccccggcaagtgatga

SEQ ID NO: 498 - protein, 11 aa, Homo Sapien
QSLLHSNGYNY

SEQ ID NO: 499 - protein, 3 aa, Homo Sapien
LGS

SEQ ID NO: 500 - protein, 9 aa, Homo Sapien
MQALQTPRT

SEQ ID NO: 501 - protein, 112 aa, Homo Sapien
DIVMTQSPLSLPVTPGEPASISCRSSQSLLHSNGYNYLDWYLQKPGQSPQLLIYLGSNRASGVPDRFSGSGSGTDFTLKISRVEAEDVGVYYCMQALQTPRTFGQGTKVEIK

SEQ ID NO: 502 - DNA, 336 bp, Homo Sapien
gatattgtgatgactcagtctccactctccctgcccgtcacccctggagagccggcctccatctcctgcaggtctagtcagagcctcctgcatagtaatggatacaactatttggattggtacctgcagaagccagggcagtctccacagctcctgatctatttgggttctaatcgggcctccggggtccctgacaggttcagtggcagtggatcaggcacagattttacactgaaaatcagcagagtggaggctgaggatgttggggtttattactgcatgcaagctctacaaactcctcggacgttcggccaagggaccaaggtggaaatcaaa

SEQ ID NO: 503 - protein, 219 aa, Homo Sapien
DIVMTQSPLSLPVTPGEPASISCRSSQSLLHSNGYNYLDWYLQKPGQSPQLLIYLGSNRASGVPDRFSGSGSGTDFTLKISRVEAEDVGVYYCMQALQTPRTFGQGTKVEIKRTVAAPSVFIFPPSDEQLKSGTASVVCLLNNFYPREAKVQWKVDNALQSGNSQESVTEQDSKDSTYSLSSTLTLSKADYEKHKVYACEVTHQGLSSPVTKSFNRGEC

SEQ ID NO: 504 - DNA, 657 bp, Homo Sapien
gatattgtgatgactcagtctccactctccctgcccgtcacccctggagagccggcctccatctcctgcaggtctagtcagagcctcctgcatagtaatggatacaactatttggattggtacctgcagaagccagggcagtctccacagctcctgatctatttgggttctaatcgggcctccggggtccctgacaggttcagtggcagtggatcaggcacagattttacactgaaaatcagcagagtggaggctgaggatgttggggtttattactgcatgcaagctctacaaactcctcggacgttcggccaagggaccaaggtggaaatcaaacgtacggtggccgctccctccgtgttcatcttcccaccttccgacgagcagctgaagtccggcaccgcttctgtcgtgtgcctgctgaacaacttctacccccgcgaggccaaggtgcagtggaaggtggacaacgccctgcagtccggcaactcccaggaatccgtgaccgagcaggactccaaggacagcacctactccctgtcctccaccctgaccctgtccaaggccgactacgagaagcacaaggtgtacgcctgcgaagtgacccaccagggcctgtctagccccgtgaccaagtctttcaaccggggcgagtgt

SEQ ID NO: 505 - protein, 239 aa, Homo Sapien
FTVTVPKDLYVVEYGSNMTIECKFPVEKQLDLAALIVYWEMEDKNIIQFVHGEEDLKVQHSSYRQRARLLKDQLSLGNAALQITDVKLQDAGVYRCMISYGGADYKRITVKVNAPYNKINQRILVVDPVTSEHELTCQAEGYPKAEVIWTSSDHQVLSGKTTTTNSKREEKLFNVTSTLRINTTTNEIFYCTFRRLDPEENHTAELVIPELPLAHPPNERTIEGRDYKDDDDKHHHHHH

SEQ ID NO: 506 - protein, 179 aa, Homo Sapien
EINGSANYEMFIFHNGGVQILCKYPDIVQQFKMQLLKGGQILCDLTKTKGSGNTVSIKSLKFCHSQLSNNSVSFFLYNLDHSHANYYFCNLSIFDPPPFKVTLTGGYLHIYESQLCCQLKFWLPIGCAAFVVVCILGCILICWLTKKKYSSSVHDPNGEYMFMRAVNTAKKSRLTDVTL

SEQ ID NO: 507 - protein, 121 aa, Homo Sapien
EINGSANYEMFIFHNGGVQILCKYPDIVQQFKMQLLKGGQILCDLTKTKGSGNTVSIKSLKFCHSQLSNNSVSFFLYNLDHSHANYYFCNLSIFDPPPFKVTLTGGYLHIYESQLCCQLKF

SEQ ID NO: 508 - protein, 199 aa, Homo Sapien
MKSGLWYFFLFCLRIKVLTGEINGSANYEMFIFHNGGVQILCKYPDIVQQFKMQLLKGGQILCDLTKTKGSGNTVSIKSLKFCHSQLSNNSVSFFLYNLDHSHANYYFCNLSIFDPPPFKVTLTGGYLHIYESQLCCQLKFWLPIGCAAFVVVCILGCILICWLTKKKYSSSVHDPNGEYMFMRAVNTAKKSRLTDVTL

SEQ ID NO: 509 - protein, 33 aa, Homo Sapien
KYSSSVHDPNGEYMFMRAVNTAKKSRLTDVTLM

SEQ ID NO: 510 - protein, 128 aa, Mus Musculus
EINGSADHRMFSFHNGGVQISCKYPETVQQLKMRLFREREVLCELTKTKGSGNAVSIKNPMLCLYHLSNNSVSFFLNNPDSSQGSYYFCSLSIFDPPPFQERNLSGGYLHIYESQLCCQLKIVVQVTE

SEQ ID NO: 511 - protein, 121 aa, Mus Musculus
EINGSADHRMFSFHNGGVQISCKYPETVQQLKMRLFREREVLCELTKTKGSGNAVSIKNPMLCLYHLSNNSVSFFLNNPDSSQGSYYFCSLSIFDPPPFQERNLSGGYLHIYESQLCCQLK

SEQ ID NO: 512 - protein, 147 aa, Mus Musculus
MGWSCIILFLVATATGVHSEINGSADHRMFSFHNGGVQISCKYPETVQQLKMRLFREREVLCELTKTKGSGNAVSIKNPMLCLYHLSNNSVSFFLNNPDSSQGSYYFCSLSIFDPPPFQERNLSGGYLHIYESQLCCQLKIVVQVTE

SEQ ID NO: 513 - protein, 199 aa, Cynomologus
MKSGLWYFFLFCLHMKVLTGEINGSANYEMFIFHNGGVQILCKYPDIVQQFKMQLLKGGQILCDLTKTKGSGNKVSIKSLKFCHSQLSNNSVSFFLYNLDRSHANYYFCNLSIFDPPPFKVTLTGGYLHIYESQLCCQLKFWLPIGCATFVVVCIFGCILICWLTKKKYSSTVHDPNGEYMFMRAVNTAKKSRLTGTTP

SEQ ID NO: 514 - protein, 120 aa, Cynomologus
EINGSANYEMFIFHNGGVQILCKYPDIVQQFKMQLLKGGQILCDLTKTKGSGNKVSIKSLKFCHSQLSNNSVSFFLYNLDRSHANYYFCNLSIFDPPPFKVTLTGGYLHIYESQLCCQLK

SEQ ID NO: 515 - protein, 240 aa, Homo Sapien
DTQEKEVRAMVGSDVELSCACPEGSRFDLNDVYVYWQTSESKTVVTYHIPQNSSLENVDSRYRNRALMSPAGMLRGDFSLRLFNVTPQDEQKFHCLVLSQSLGFQEVLSVEVTLHVAANFSVPVVSAPHSPSQDELTFTCTSINGYPRPNVYWINKTDNSLLDQALQNDTVFLNMRGLYDVVSVLRIARTPSVNIGCCIENVLLQQNLTVGSQTGNDIGERDKITENPVSTGEKNAATWS

SEQ ID NO: 516 - protein, 302 aa, Homo Sapien
MRLGSPGLLFLLFSSLRADTQEKEVRAMVGSDVELSCACPEGSRFDLNDVYVYWQTSESKTVVTYHIPQNSSLENVDSRYRNRALMSPAGMLRGDFSLRLFNVTPQDEQKFHCLVLSQSLGFQEVLSVEVTLHVAANFSVPVVSAPHSPSQDELTFTCTSINGYPRPNVYWINKTDNSLLDQALQNDTVFLNMRGLYDVVSVLRIARTPSVNIGCCIENVLLQQNLTVGSQTGNDIGERDKITENPVSTGEKNAATWSILAVLCLLVVVAVAIGWVCRDRCLQHSYAGAWAVSPETELTGHV

SEQ ID NO: 517 - protein, 113 aa, Homo Sapien
LQMILNGINNYKNPKLTAMLTFKFYMPKKATELKHLQCLEEELKPLEEVLNLAQSKNFHLRPRDLISNINVIVLELKGSETTFMCEYADETATIVEFLNRWITFCQSIISTLT

SEQ ID NO: 518 - protein, 113 aa, Homo Sapien
LQMILNGINNYKNPKLTQMLTFKFYMPKKATELKHLQCLEEELKPLEEVLNLAQSKNFHLRPRDLISNINVIVLELKGSETTFMCEYADETATIVEFLNRWITFCQSIISTLT

SEQ ID NO: 519 - DNA, 336 bp, Homo Sapien
gatattgtgatgactcagtctccactctccctgcccgtcacccctggagagccggcctccatctcctgcaggtctagtcagagcctcctgcatagtgatggatacaactatttggattggtacctgcagaagccagggcagtctccacagctcctgatctatttgggttctactcgggcctccgggttccctgacaggttcagtggcagtggatcaggcacagattttacactgaaaatcagcagagtggaggctgaggatgttggggtttattactgcatgcaagctctacaaactccgctcagttttggccaggggaccaagctggagatcaaa

SEQ ID NO: 520 - DNA, 657 bp, Homo Sapien
gatattgtgatgactcagtctccactctccctgcccgtcacccctggagagccggcctccatctcctgcaggtctagtcagagcctcctgcatagtgatggatacaactatttggattggtacctgcagaagccagggcagtctccacagctcctgatctatttgggttctactcgggcctccgggttccctgacaggttcagtggcagtggatcaggcacagattttacactgaaaatcagcagagtggaggctgaggatgttggggtttattactgcatgcaagctctacaaactccgctcagttttggccaggggaccaagctggagatcaaacgtacggtggccgctccctccgtgttcatcttcccaccttccgacgagcagctgaagtccggcaccgcttctgtcgtgtgcctgctgaacaacttctacccccgcgaggccaaggtgcagtggaaggtggacaacgccctgcagtccggcaactcccaggaatccgtgaccgagcaggactccaaggacagcacctactccctgtcctccaccctgaccctgtccaaggccgactacgagaagcacaaggtgtacgcctgcgaagtgacccaccagggcctgtctagccccgtgaccaagtctttcaaccggggcgagtgt

SEQ ID NO: 521 - DNA, 372 bp, Homo Sapien
gaggtgcagctggtggagtctgggggaggtgtggtacggcctggggggtccctgagactctcctgtgtagcctctggagtcacctttgatgattatggcatgagctgggtccgccaagctccagggaaggggctggagtgggtctctggtattaattggaatggtggcgacacagattattcagactctgtgaagggccgattcaccatctccagagacaacgccaagaactccctgtatctacaaatgaatagtctgagagccgaggacacggccttgtattactgtgcgagggatttctatggttcggggagttattatcacgttccttttgactactggggccagggaatcctggtcaccgtctcctca

SEQ ID NO: 522 - DNA, 1368 bp, Homo Sapien
gaggtgcagctggtggagtctgggggaggtgtggtacggcctggggggtccctgagactctcctgtgtagcctctggagtcacctttgatgattatggcatgagctgggtccgccaagctccagggaaggggctggagtgggtctctggtattaattggaatggtggcgacacagattattcagactctgtgaagggccgattcaccatctccagagacaacgccaagaactccctgtatctacaaatgaatagtctgagagccgaggacacggccttgtattactgtgcgagggatttctatggttcggggagttattatcacgttccttttgactactggggccagggaatcctggtcaccgtctcctcagccagcaccaagggcccctctgtgttccctctggccccttccagcaagtccacctctggcggaacagccgctctgggctgcctcgtgaaggactacttccccgagcctgtgaccgtgtcctggaactctggcgctctgaccagcggagtgcacaccttccctgctgtgctgcagtcctccggcctgtactccctgtcctccgtcgtgaccgtgccttccagctctctgggcacccagacctacatctgcaacgtgaaccacaagccctccaacaccaaggtggacaagaaggtggaacccaagtcctgcgacaagacccacacctgtcccccttgtcctgcccctgaactgctgggcggaccttccgtgttcctgttccccccaaagcccaaggacaccctgatgatctcccggacccccgaagtgacctgcgtggtggtggatgtgtcccacgaggaccctgaagtgaagttcaattggtacgtggacggcgtggaagtgcacaacgccaagaccaagcctagagaggaacagtacaactccacctaccgggtggtgtccgtgctgaccgtgctgcaccaggattggctgaacggcaaagagtacaagtgcaaggtgtccaacaaggccctgcctgcccccatcgaaaagaccatctccaaggccaagggccagccccgggaaccccaggtgtacacactgccccctagcagggacgagctgaccaagaaccaggtgtccctgacctgtctcgtgaaaggcttctacccctccgatatcgccgtggaatgggagtccaacggccagcctgagaacaactacaagaccaccccccctgtgctggactccgacggctcattcttcctgtacagcaagctgacagtggacaagtcccggtggcagcagggcaacgtgttctcctgctccgtgatgcacgaggccctgcacaaccactacacccagaagtccctgtccctgagccccggcaagtgatga

SEQ ID NO: 523 - DNA, 990 bp, Homo Sapien
gcctccaccaagggcccatcggtcttccccctggcaccctcctccaagagcacctctgggggcacagcggccctgggctgcctggtcaaggactacttccccgaaccggtgacggtgtcgtggaactcaggcgccctgaccagcggcgtgcacaccttcccggctgtcctacagtcctcaggactctactccctcagcagcgtggtgaccgtgccctccagcagcttgggcacccagacctacatctgcaacgtgaatcacaagcccagcaacaccaaggtggacaagagagttgagcccaaatcttgtgacaaaactcacacatgcccaccgtgcccagcacctgaactcctggggggaccgtcagtcttcctcttccccccaaaacccaaggacaccctcatgatctcccggacccctgaggtcacatgcgtggtggtggacgtgagccacgaagaccctgaggtcaagttcaactggtacgtggacggcgtggaggtgcataatgccaagacaaagccgcgggaggagcagtacaacagcacgtaccgtgtggtcagcgtcctcaccgtcctgcaccaggactggctgaatggcaaggagtacaagtgcaaggtctccaacaaagccctcccagcccccatcgagaaaaccatctccaaagccaaagggcagccccgagaaccacaggtgtacaccctgcccccatcccgggaggagatgaccaagaaccaggtcagcctgacctgcctggtcaaaggcttctatcccagcgacatcgccgtggagtgggagagcaatgggcagccggagaacaactacaagaccacgcctcccgtgctggactccgacggctccttcttcctctatagcaagctcaccgtggacaagagcaggtggcagcaggggaacgtcttctcatgctccgtgatgcatgaggctctgcacaaccactacacgcagaagagcctctccctgtccccgggtaaa

SEQ ID NO: 524 - protein, 330 aa, Homo Sapien
ASTKGPSVFPLAPSSKSTSGGTAALGCLVKDYFPEPVTVSWNSGALTSGVHTFPAVLQSSGLYSLSSVVTVPSSSLGTQTYICNVNHKPSNTKVDKRVEPKSCDKTHTCPPCPAPELLGGPSVFLFPPKPKDTLMISRTPEVTCVVVDVSHEDPEVKFNWYVDGVEVHNAKTKPREEQYNSTYRVVSVLTVLHQDWLNGKEYKCKVSNKALPAPIEKTISKAKGQPREPQVYTLPPSREEMTKNQVSLTCLVKGFYPSDIAVEWESNGQPENNYKTTPPVLDSDGSFFLYSKLTVDKSRWQQGNVFSCSVMHEALHNHYTQKSLSLSPGK

SEQ ID NO: 525 - DNA, 990 bp, Homo Sapien
gcctccaccaagggcccatcggtcttccccctggcaccctcctccaagagcacctctgggggcacagcggccctgggctgcctggtcaaggactacttccccgaaccggtgacggtgtcgtggaactcaggcgccctgaccagcggcgtgcacaccttcccggctgtcctacagtcctcaggactctactccctcagcagcgtggtgaccgtgccctccagcagcttgggcacccagacctacatctgcaacgtgaatcacaagcccagcaacaccaaggtggacaagaaagttgagcccaaatcttgtgacaaaactcacacatgcccaccgtgcccagcacctgaactcctggggggaccgtcagtcttcctcttccccccaaaacccaaggacaccctcatgatctcccggacccctgaggtcacatgcgtggtggtggacgtgagccacgaagaccctgaggtcaagttcaactggtacgtggacggcgtggaggtgcataatgccaagacaaagccgcgggaggagcagtacaacagcacgtaccgtgtggtcagcgtcctcaccgtcctgcaccaggactggctgaatggcaaggagtacaagtgcaaggtctccaacaaagccctcccagcccccatcgagaaaaccatctccaaagccaaagggcagccccgagaaccacaggtgtacaccctgcccccatcccgggatgagctgaccaagaaccaggtcagcctgacctgcctggtcaaaggcttctatcccagcgacatcgccgtggagtgggagagcaatgggcagccggagaacaactacaagaccacgcctcccgtgctggactccgacggctccttcttcctctacagcaagctcaccgtggacaagagcaggtggcagcaggggaacatcttctcatgctccgtgatgcatgaggctctgcacaaccactacacgcagaagagcctctccctgtctccgggtaaa

SEQ ID NO: 526 - protein, 330 aa, Homo Sapien
ASTKGPSVFPLAPSSKSTSGGTAALGCLVKDYFPEPVTVSWNSGALTSGVHTFPAVLQSSGLYSLSSVVTVPSSSLGTQTYICNVNHKPSNTKVDKKVEPKSCDKTHTCPPCPAPELLGGPSVFLFPPKPKDTLMISRTPEVTCVVVDVSHEDPEVKFNWYVDGVEVHNAKTKPREEQYNSTYRVVSVLTVLHQDWLNGKEYKCKVSNKALPAPIEKTISKAKGQPREPQVYTLPPSRDELTKNQVSLTCLVKGFYPSDIAVEWESNGQPENNYKTTPPVLDSDGSFFLYSKLTVDKSRWQQGNIFSCSVMHEALHNHYTQKSLSLSPGK

SEQ ID NO: 527 - DNA, 978 bp, Homo Sapien
gcctccaccaagggcccatcggtcttccccctggcgccctgctccaggagcacctccgagagcacagccgccctgggctgcctggtcaaggactacttccccgaaccggtgacggtgtcgtggaactcaggcgctctgaccagcggcgtgcacaccttcccagctgtcctacagtcctcaggactctactccctcagcagcgtggtgaccgtgccctccagcaacttcggcacccagacctacacctgcaacgtagatcacaagcccagcaacaccaaggtggacaagacagttgagcgcaaatgttgtgtcgagtgcccaccgtgcccagcaccacctgtggcaggaccgtcagtcttcctcttccccccaaaacccaaggacaccctcatgatctcccggacccctgaggtcacgtgcgtggtggtggacgtgagccacgaagaccccgaggtccagttcaactggtacgtggacggcgtggaggtgcataatgccaagacaaagccacgggaggagcagttcaacagcacgttccgtgtggtcagcgtcctcaccgttgtgcaccaggactggctgaacggcaaggagtacaagtgcaaggtctccaacaaaggcctcccagcccccatcgagaaaaccatctccaaaaccaaagggcagccccgagaaccacaggtgtacaccctgcccccatcccgggaggagatgaccaagaaccaggtcagcctgacctgcctggtcaaaggcttctaccccagcgacatcgccgtggagtgggagagcaatgggcagccggagaacaactacaagaccacacctcccatgctggactccgacggctccttcttcctctacagcaagctcaccgtggacaagagcaggtggcagcaggggaacgtcttctcatgctccgtgatgcatgaggctctgcacaaccactacacgcagaagagcctctccctgtctccgggtaaa

SEQ ID NO: 528 - protein, 326 aa, Homo Sapien
ASTKGPSVFPLAPCSRSTSESTAALGCLVKDYFPEPVTVSWNSGALTSGVHTFPAVLQSSGLYSLSSVVTVPSSNFGTQTYTCNVDHKPSNTKVDKTVERKCCVECPPCPAPPVAGPSVFLFPPKPKDTLMISRTPEVTCVVVDVSHEDPEVQFNWYVDGVEVHNAKTKPREEQFNSTFRVVSVLTVVHQDWLNGKEYKCKVSNKGLPAPIEKTISKTKGQPREPQVYTLPPSREEMTKNQVSLTCLVKGFYPSDIAVEWESNGQPENNYKTTPPMLDSDGSFFLYSKLTVDKSRWQQGNVFSCSVMHEALHNHYTQKSLSLSPGK

SEQ ID NO: 529 - DNA, 978 bp, Homo Sapien
gcctccaccaagggcccatcggtcttccccctggcgccctgctccaggagcacctccgagagcacagcggccctgggctgcctggtcaaggactacttccccgaaccggtgacggtgtcgtggaactcaggcgctctgaccagcggcgtgcacaccttcccggctgtcctacagtcctcaggactctactccctcagcagcgtggtgaccgtgacctccagcaacttcggcacccagacctacacctgcaacgtagatcacaagcccagcaacaccaaggtggacaagacagttgagcgcaaatgttgtgtcgagtgcccaccgtgcccagcaccacctgtggcaggaccgtcagtcttcctcttccccccaaaacccaaggacaccctcatgatctcccggacccctgaggtcacgtgcgtggtggtggacgtgagccacgaagaccccgaggtccagttcaactggtacgtggacggcatggaggtgcataatgccaagacaaagccacgggaggagcagttcaacagcacgttccgtgtggtcagcgtcctcaccgtcgtgcaccaggactggctgaacggcaaggagtacaagtgcaaggtctccaacaaaggcctcccagcccccatcgagaaaaccatctccaaaaccaaagggcagccccgagaaccacaggtgtacaccctgcccccatcccgggaggagatgaccaagaaccaggtcagcctgacctgcctggtcaaaggcttctaccccagcgacatcgccgtggagtgggagagcaatgggcagccggagaacaactacaagaccacacctcccatgctggactccgacggctccttcttcctctacagcaagctcaccgtggacaagagcaggtggcagcaggggaacgtcttctcatgctccgtgatgcatgaggctctgcacaaccactacacacagaagagcctctccctgtctccgggtaaa

SEQ ID NO: 530 - protein, 326 aa, Homo Sapien
ASTKGPSVFPLAPCSRSTSESTAALGCLVKDYFPEPVTVSWNSGALTSGVHTFPAVLQSSGLYSLSSVVTVTSSNFGTQTYTCNVDHKPSNTKVDKTVERKCCVECPPCPAPPVAGPSVFLFPPKPKDTLMISRTPEVTCVVVDVSHEDPEVQFNWYVDGMEVHNAKTKPREEQFNSTFRVVSVLTVVHQDWLNGKEYKCKVSNKGLPAPIEKTISKTKGQPREPQVYTLPPSREEMTKNQVSLTCLVKGFYPSDIAVEWESNGQPENNYKTTPPMLDSDGSFFLYSKLTVDKSRWQQGNVFSCSVMHEALHNHYTQKSLSLSPGK

SEQ ID NO: 531 - DNA, 978 bp, Homo Sapien
gcctccaccaagggcccatcggtcttccccctggcgccctgctccaggagcacctccgagagcacagcggccctgggctgcctggtcaaggactacttccccgaaccggtgacggtgtcgtggaactcaggcgctctgaccagcggcgtgcacaccttcccagctgtcctacagtcctcaggactctactccctcagcagcgtggtgaccgtgccctccagcagcttgggcacccagacctacacctgcaacgtagatcacaagcccagcaacaccaaggtggacaagacagttgagcgcaaatgttgtgtcgagtgcccaccgtgcccagcaccacctgtggcaggaccgtcagtcttcctcttccccccaaaacccaaggacaccctcatgatctcccggacccctgaggtcacgtgcgtggtggtggacgtgagccacgaagaccccgaggtccagttcaactggtacgtggacggcgtggaggtgcataatgccaagacaaagccacgggaggagcagttcaacagcacgttccgtgtggtcagcgtcctcaccgttgtgcaccaggactggctgaacggcaaggagtacaagtgcaaggtctccaacaaaggcctcccagcccccatcgagaaaaccatctccaaaaccaaagggcagccccgagaaccacaggtgtacaccctgcccccatcccgggaggagatgaccaagaaccaggtcagcctgacctgcctggtcaaaggcttctaccccagcgacatcgccgtggagtgggagagcaatgggcagccggagaacaactacaagaccacacctcccatgctggactccgacggctccttcttcctctacagcaagctcaccgtggacaagagcaggtggcagcaggggaacgtcttctcatgctccgtgatgcatgaggctctgcacaaccactacacgcagaagagcctctccctgtctccgggtaaa

SEQ ID NO: 532 - protein, 326 aa, Homo Sapien
ASTKGPSVFPLAPCSRSTSESTAALGCLVKDYFPEPVTVSWNSGALTSGVHTFPAVLQSSGLYSLSSVVTVPSSSLGTQTYTCNVDHKPSNTKVDKTVERKCCVECPPCPAPPVAGPSVFLFPPKPKDTLMISRTPEVTCVVVDVSHEDPEVQFNWYVDGVEVHNAKTKPREEQFNSTFRVVSVLTVVHQDWLNGKEYKCKVSNKGLPAPIEKTISKTKGQPREPQVYTLPPSREEMTKNQVSLTCLVKGFYPSDIAVEWESNGQPENNYKTTPPMLDSDGSFFLYSKLTVDKSRWQQGNVFSCSVMHEALHNHYTQKSLSLSPGK

SEQ ID NO: 533 - DNA, 978 bp, Homo Sapien
gcctccaccaagggcccatcggtcttccccctggcgccctgctccaggagcacctccgagagcacagcggccctgggctgcctggtcaaggactacttccccgaaccggtgacggtgtcgtggaactcaggcgctctgaccagcggcgtgcacaccttcccggctgtcctacagtcctcaggactctactccctcagcagcgtggtgaccgtgccctccagcaacttcggcacccagacctacacctgcaacgtagatcacaagcccagcaacaccaaggtggacaagacagttgagcgcaaatgttgtgtcgagtgcccaccgtgcccagcaccacctgtggcaggaccgtcagtcttcctcttccccccaaaacccaaggacaccctcatgatctcccggacccctgaggtcacgtgcgtggtggtggacgtgagccacgaagaccccgaggtccagttcaactggtacgtggacggcgtggaggtgcataatgccaagacaaagccacgggaggagcagttcaacagcacgttccgtgtggtcagcgtcctcaccgtcgtgcaccaggactggctgaacggcaaggagtacaagtgcaaggtctccaacaaaggcctcccagcccccatcgagaaaaccatctccaaaaccaaagggcagccccgagaaccacaggtgtacaccctgcccccatcccgggaggagatgaccaagaaccaggtcagcctgacctgcctggtcaaaggcttctaccccagcgacatctccgtggagtgggagagcaatgggcagccggagaacaactacaagaccacacctcccatgctggactccgacggctccttcttcctctacagcaagctcaccgtggacaagagcaggtggcagcaggggaacgtcttctcatgctccgtgatgcatgaggctctgcacaaccactacacacagaagagcctctccctgtctccgggtaaa

SEQ ID NO: 534 - protein, 326 aa, Homo Sapien
ASTKGPSVFPLAPCSRSTSESTAALGCLVKDYFPEPVTVSWNSGALTSGVHTFPAVLQSSGLYSLSSVVTVPSSNFGTQTYTCNVDHKPSNTKVDKTVERKCCVECPPCPAPPVAGPSVFLFPPKPKDTLMISRTPEVTCVVVDVSHEDPEVQFNWYVDGVEVHNAKTKPREEQFNSTFRVVSVLTVVHQDWLNGKEYKCKVSNKGLPAPIEKTISKTKGQPREPQVYTLPPSREEMTKNQVSLTCLVKGFYPSDISVEWESNGQPENNYKTTPPMLDSDGSFFLYSKLTVDKSRWQQGNVFSCSVMHEALHNHYTQKSLSLSPGK

SEQ ID NO: 535 - DNA, 318 bp, Homo Sapien
ggtcagcccaaggctgccccctcggtcactctgttcccaccctcctctgaggagcttcaagccaacaaggccacactggtgtgtctcgtaagtgacttcaacccgggagccgtgacagtggcctggaaggcagatggcagccccgtcaaggtgggagtggagaccaccaaaccctccaaacaaagcaacaacaagtatgcggccagcagctacctgagcctgacgcccgagcagtggaagtcccacagaagctacagctgccgggtcacgcatgaagggagcaccgtggagaagacagtggcccctgcagaatgctct

SEQ ID NO: 536 - protein, 106 aa, Homo Sapien
GQPKAAPSVTLFPPSSEELQANKATLVCLVSDFNPGAVTVAWKADGSPVKVGVETTKPSKQSNNKYAASSYLSLTPEQWKSHRSYSCRVTHEGSTVEKTVAPAECS

SEQ ID NO: 537 - DNA, 990 bp, Homo Sapien
gcctccaccaagggcccatcggtcttccccctggcaccctcctccaagagcacctctgggggcacagcggccctgggctgcctggtcaaggactacttccccgaaccggtgacggtgtcgtggaactcaggcgccctgaccagcggcgtgcacaccttcccggctgtcctacagtcctcaggactctactccctcagcagcgtggtgaccgtgccctccagcagcttgggcacccagacctacatctgcaacgtgaatcacaagcccagcaacaccaaggtggacaagaaagttgagcccaaatcttgtgacaaaactcacacatgcccaccgtgcccagcacctgaactcctggggggaccgtcagtcttcctcttccccccaaaacccaaggacaccctcatgatctcccggacccctgaggtcacatgcgtggtggtggacgtgagccacgaagaccctgaggtcaagttcaactggtacgtggacggcgtggaggtgcataatgccaagacaaagccgcgggaggagcagtacaacagcacgtaccgggtggtcagcgtcctcaccgtcctgcaccaggactggctgaatggcaaggagtacaagtgcaaggtctccaacaaagccctcccagcccccatcgagaaaaccatctccaaagccaaagggcagccccgagaaccacaggtgtacaccctgcccccatcccgggatgagctgaccaagaaccaggtcagcctgacctgcctggtcaaaggcttctatcccagcgacatcgccgtggagtgggagagcaatgggcagccggagaacaactacaagaccacgcctcccgtgctggactccgacggctccttcttcctctacagcaagctcaccgtggacaagagcaggtggcagcaggggaacgtcttctcatgctccgtgatgcatgaggctctgcacaaccactacacgcagaagagcctctccctgtctccgggtaaa

SEQ ID NO: 538 - protein, 106 aa, Homo Sapien; identical to SEQ ID NO: 225

SEQ ID NO: 539 - protein, 157 aa, Homo Sapien
MGWSCIILFLVATATGVHSMMTGTIETTGNISAEKGGSIILQCHLSSTTAQVTQVNWEQQDQLLAICNADLGWHISPSFKDRVAPGPGLGLTLQSLTVNDTGEYFCIYHTYPDGTYTGRIFLEVLESSVAEHGARFQIPIEGRDYKDDDDKHHHHHH

SEQ ID NO: 540 - protein, 244 aa, Homo Sapien
MRWCLLLIWAQGLRQAPLASGMMTGTIETTGNISAEKGGSIILQCHLSSTTAQVTQVNWEQQDQLLAICNADLGWHISPSFKDRVAPGPGLGLTLQSLTVNDTGEYFCIYHTYPDGTYTGRIFLEVLESSVAEHGARFQIPLLGAMAATLVVICTAVIVVVALTRKKKALRIHSVEGDLRRKSAGQEEWSPSAPSPPGSCVQAEAAPAGLCGEQRGEDCAELHDYFNVLSYRSLGNCSFFTETG

SEQ ID NO: 541 - DNA, 2978 bp, Homo Sapien
cgtcctatctgcagtcggctactttcagtggcagaagaggccacatctgcttcctgtaggccctctgggcagaagcatgcgctggtgtctcctcctgatctgggcccaggggctgaggcaggctcccctcgcctcaggaatgatgacaggcacaatagaaacaacggggaacatttctgcagagaaaggtggctctatcatcttacaatgtcacctctcctccaccacggcacaagtgacccaggtcaactgggagcagcaggaccagcttctggccatttgtaatgctgacttggggtggcacatctccccatccttcaaggatcgagtggccccaggtcccggcctgggcctcaccctccagtcgctgaccgtgaacgatacaggggagtacttctgcatctatcacacctaccctgatgggacgtacactgggagaatcttcctggaggtcctagaaagctcagtggctgagcacggtgccaggttccagattccattgcttggagccatggccgcgacgctggtggtcatctgcacagcagtcatcgtggtggtcgcgttgactagaaagaagaaagccctcagaatccattctgtggaaggtgacctcaggagaaaatcagctggacaggaggaatggagccccagtgctccctcacccccaggaagctgtgtccaggcagaagctgcacctgctgggctctgtggagagcagcggggagaggactgtgccgagctgcatgactacttcaatgtcctgagttacagaagcctgggtaactgcagcttcttcacagagactggttagcaaccagaggcatcttctggaagatacacttttgtctttgctattatagatgaatatataagcagctgtactctccatcagtgctgcgtgtgtgtgtgtgtgtgtatgtgtgtgtgtgttcagttgagtgaataaatgtcatcctcttctccatcttcatttccttggccttttcgttctattccattttgcattatggcaggcctagggtgagtaacgtggatcttgatcataaatgcaaaattaaaaaatatcttgacctggttttaaatctggcagtttgagcagatcctatgtctctgagagacacattcctcataatggccagcattttgggctacaaggttttgtggttgatgatgaggatggcatgactgcagagccatcctcatctcattttttcacgtcattttcagtaactttcactcattcaaaggcaggttataagtaagtcctggtagcagcctctatggggagatttgagagtgactaaatcttggtatctgccctcaagaacttacagttaaatggggagacaatgttgtcatgaaaaggtattatagtaaggagagaaggagacatacacaggccttcaggaagagacgacagtttggggtgaggtagttggcataggcttatctgtgatgaagtggcctgggagcaccaaggggatgttgaggctagtctgggaggagcaggagttttgtctagggaacttgtaggaaattcttggagctgaaagtcccacaaagaaggccctggcaccaagggagtcagcaaacttcagattttattctctgggcaggcatttcaagtttccttttgctgtgacatactcatccattagacagcctgatacaggcctgtagcctcttccggccgtgtgtgctggggaagccccaggaaacgcacatgcccacacagggagccaagtcgtagcatttgggccttgatctaccttttctgcatcaatacactcttgagcctttgaaaaaagaacgtttcccactaaaaagaaaatgtggatttttaaaatagggactcttcctaggggaaaaaggggggctgggagtgatagagggtttaaaaaataaacaccttcaaactaacttcttcgaacccttttattcactccctgacgactttgtgctggggttggggtaactgaaccgcttatttctgtttaattgcattcaggctggatcttagaagacttttatccttccaccatctctctcagaggaatgagcggggaggttggatttactggtgactgattttctttcatgggccaaggaactgaaagagaatgtgaagcaaggttgtgtcttgcgcatggttaaaaataaagcattgtcctgcttcctaagacttagactggggttgacaattgttttagcaacaagacaattcaactatttctcctaggatttttattattattattttttcacttttctaccaaatgggttacataggaagaatgaactgaaatctgtccagagctccaagtcctttggaagaaagattagatgaacgtaaaaatgttgttgtttgctgtggcagtttacagcatttttcttgcaaaattagtgcaaatctgttggaaatagaacacaattcacaaattggaagtgaactaaaatgtaatgacgaaaagggagtagtgttttgatttggaggaggtgtatattcggcagaggttggactgagagttgggtgttatttaacataattatggtaattgggaaacatttataaacactattgggatggtgataaaatacaaaagggcctatagatgttagaaatgggtcaggttactgaaatgggattcaatttgaaaaaaatttttttaaatagaactcactgaactagattctcctctgagaaccagagaagaccatttcatagttggattcctggagacatgcgctatccaccacgtagccactttccacatgtggccatcaaccacttaagatggggttagtttaaatcaagatgtgctgttataattggtataagcataaaatcacactagattctggagatttaatatgaataataagaatactatttcagtagttttggtatattgtgtgtcaaaaatgataatattttggatgtattgggtgaaataaaatattaacattaaaaaaaaaaa

SEQ ID NO: 542 - DNA, 417 bp, Homo Sapien
atgggctggtcctgcatcatcctgtttctggtggccacagccaccggcgtgcacagcatgatgaccggcaccatcgagacaaccggcaacatcagcgccgagaagggcggctctatcatcctgcagtgccacctgagcagcaccaccgcccaagtgacccaagtgaactgggagcagcaggatcagctgctggccatctgcaacgccgatctgggctggcacatcagccccagcttcaaggacagagtggcccctggacctggcctgggactgacactgcagagcctgaccgtgaacgataccggcgagtacttctgcatctaccacacctaccccgacggcacctataccggccggatcttcctggaagtgctggaaagcagcgtggccgagcacggcgccagattccagatccct

SEQ ID NO: 543 - DNA, 732 bp, Homo Sapien
atgaggtggtgtctgctgctgatctgggctcagggcctgagacaggcccctctggctagcggaatgatgaccggcaccatcgagacaaccggcaacatcagcgccgagaagggcggcagcatcatcctgcagtgtcacctgagcagcaccaccgcacaagtgacccaagtgaactgggagcagcaggaccagctgctggccatctgtaacgctgacctgggctggcacatcagccccagcttcaaggacagagtggctcctggccctggcctgggactgactctgcagtctctgaccgtgaacgataccggcgagtacttctgcatctaccacacctaccccgacggcacctataccggcagaatcttcctggaagtgctggaaagcagcgtggccgagcacggcgccagattccagattcctctgctgggcgccatggccgccacactggtcgtgatctgtaccgccgtgatcgtggtggtggccctgaccagaaagaagaaggccctgcggatccacagcgtggaaggcgacctgagaagaaagtctgccggccaggaagagtggtcccctagcgctccaagccctcctggctcttgtgtgcaggctgaggctgctcctgctggcctgtgtggcgaacagagaggcgaggattgcgccgagctgcacgactacttcaacgtgctgagctacagaagcctgggcaactgcagcttcttcaccgagacaggc

SEQ ID NO: 544 - protein, 170 aa, Homo Sapien
MRWCLLLIWAQGLRQAPLASGMMTGTIETTGNISAEKGGSIILQCHLSSTTAQVTQVNWEQQDQLLAICNADLGWHISPSFKDRVAPGPGLGLTLQSLTVNDTGEYFCIYHTYPDGTYTGRIFLEVLESSVAEHGARFQIPLLGAMAATLVVICTAVIVVVALTRKFVCF

SEQ ID NO: 545 - protein, 375 aa, Homo Sapien
MGWSCIILFLVATATGVHSMMTGTIETTGNISAEKGGSIILQCHLSSTTAQVTQVNWEQQDQLLAICNADLGWHISPSFKDRVAPGPGLGLTLQSLTVNDTGEYFCIYHTYPDGTYTGRIFLEVLESSVAEHGARFQIPIEGREPKSCDKTHTCPPCPAPELLGGPSVFLFPPKPKDTLMISRTPEVTCVVVDVSHEDPEVKFNWYVDGVEVHNAKTKPREEQYNSTYRVVSVLTVLHQDWLNGKEYKCKVSNKALPAPIEKTISKAKGQPREPQVYTLPPSRDELTKNQVSLTCLVKGFYPSDIAVEWESNGQPENNYKTTPPVLDSDGSFFLYSKLTVDKSRWQQGNVFSCSVMHEALHNHYTQKSLSLSPGK

SEQ ID NO: 546 - protein, 357 aa, Homo Sapien
MMTGTIETTGNISAEKGGSIILQCHLSSTTAQVTQVNWEQQDQLLAICNADLGWHISPSFKDRVAPGPGLGLTLQSLTVNDAGEYFCIYHTYPDGTYTGRIFLEVLESSVAEHGARFQIPIEGRMDPKSCDKTHTCPPCPAPELLGGPSVFLFPPKPKDTLMISRTPEVTCVVVDVSHEDPEVKFNWYVDGVEVHNAKTKPREEQYNSTYRVVSVLTVLHQDWLNGKEYKCKVSNKALPAPIEKTISKAKGQPREPQVYTLPPSRDELTKNQVSLTCLVKGFYPSDIAVEWESNGQPENNYKTTPPVLDSDGSFFLYSKLTVDKSRWQQGNVFSCSVMHEALHNHYTQKSLSLSPGK

SEQ ID NO: 547 - protein, 244 aa, Cynomologus
MRWCLFLIWAQGLRQAPLASGMMTGTIETTGNISAKKGGSVILQCHLSSTMAQVTQVNWEQHDHSLLAIRNAELGWHIYPAFKDRVAPGPGLGLTLQSLTMNDTGEYFCTYHTYPDGTYRGRIFLEVLESSVAEHSARFQIPLLGAMAMMLVVICIAVIVVVVLARKKSLRIHSVESGLQRKSTGQEEQIPSAPSPPGSCVQAEAAPAGLCGEQQGDDCAELHDYFNVLSYRSLGSCSFFTETG

SEQ ID NO: 548 - DNA, 1259 bp, Cynomologus
ctcctgctgcaggatgttgcccttgttcgaggcagagacaggaggcctcagacagctgtgacagccctggagctctcctaccacatctgagccagagggaagactttggagaagcagaagcccaaagacactgctgggagattggtctgtgctctgggagaaccctaggttgtgtttcccgtgtacaagtcacggatcttctggaaggtaccaccgctcccagccccgcttggctgagggctgagggccacaggttttcgggactgtgcctgtggttggaggctgtggactcaagctcagttttaccgtcctatctgcagtcggctactttcggtggcagaagaggccacatctgcttcctgtaagccctctgggcagaagcatgcggtggtgtctcttcctgatctgggcccaggggctgaggcaggctcccctcgcctcaggaatgatgacaggcacaatagaaacaacggggaacatttctgcaaagaaaggtggctctgttatcttacaatgtcacctctcctccaccatggcacaagtgacccaggtcaactgggagcagcatgaccattcgcttctggccattcgtaatgctgagttggggtggcacatctacccagccttcaaggatcgagtggccccgggtcctggcctgggcctcaccctccagtcgctgaccatgaatgatacaggggagtacttctgcacctatcacacctaccctgatgggacttacagagggagaatcttcctggaggtcctagaaagctcagtggctgagcacagtgccaggttccagattccattgcttggagccatggccatgatgctggtggtcatctgcatagcagtcatcgtggtggtcgtgttggctagaaagaaatccctcagaatccattctgtggaaagtggcctccagagaaaatcaactggacaggaagaacagattcccagtgctccctcacccccaggaagctgtgtccaggcagaagctgcacctgctgggctctgtggagagcagcagggagatgactgtgccgagctgcatgactacttcaatgtcctgagttacagaagcctggggagctgcagcttcttcacagagactgggtagcaaacagaggcatgttctggaagatacacttttgtcttgactattatagatgtcttgactaatatataaacagctgtattcgccatcagtgtgcgcgcgcgtgtgtgttcagttgagtgaataaatgtcatcctcttctcta

SEQ ID NO: 549 - protein, 245 aa, Cynomologus
MRWCLFLIWAQGLRQAPLASGMMTGTIETTGNISAKKGGSVILQCHLSSTMAQVTQVNWEQHDHSLLAIRNAELGWHIYPAFKDRVAPGPGLGLTLQSLTMNDTGEYFCTYHTYPDGTYRGRIFLEVLESSVAEHSARFQIPLLGAMAMMLVVICIAVIVVVVLARKKKSLRIHSVESGLQRKSTGQEEQIPSAPSPPGSCVQAEAAPAGLCGEQQGDDCAELHDYFNVLSYRSLGSCSFFTETG

SEQ ID NO: 550 - DNA, 1260 bp, Cynomologus
cctgctgcaggatgttgcccttgttcgaggcagagacaggaggcctcagacagctgtgacagccctggagctctcctaccacatctgagccagagggaagactttggagaagcagaagcccaaagacactgctgggagattggtctgtgctctgggagaaccctaggttgtgtttcccgtgtacaagtcacggatcttctggaaggtaccaccgctcccagccccgcttggctgagggctgagggccacaggttttcgggactgtgcctgtggttggaggctgtggactcaagctcagttttaccgtcctatctgcagtcggctactttcggtggcagaagaggccacatctgcttcctgtaagccctctgggcagaagcatgcggtggtgtctcttcctgatctgggcccaggggctgaggcaggctcccctcgcctcaggaatgatgacaggcacaatagaaacaacggggaacatttctgcaaagaaaggtggctctgttatcttacaatgtcacctctcctccaccatggcacaagtgacccaggtcaactgggagcagcatgaccattcgcttctggccattcgtaatgctgagttggggtggcacatctacccagccttcaaggatcgagtggccccgggtcctggcctgggcctcaccctccagtcgctgaccatgaatgatacaggggagtacttctgcacctatcacacctaccctgatgggacttacagagggagaatcttcctggaggtcctagaaagctcagtggctgagcacagtgccaggttccagattccattgcttggagccatggccatgatgctggtggtcatctgcatagcagtcatcgtggtggtcgtgttggctagaaagaagaaatccctcagaatccattctgtggaaagtggcctccagagaaaatcaactggacaggaagaacagattcccagtgctccctcacccccaggaagctgtgtccaggcagaagctgcacctgctgggctctgtggagagcagcagggagatgactgtgccgagctgcatgactacttcaatgtcctgagttacagaagcctggggagctgcagcttcttcacagagactgggtagcaaacagaggcatgttctggaagatacacttttgtcttgactattatagatgtcttgactaatatataaacagctgtattcgccatcagtgtgcgcgcgcgtgtgtgttcagttgagtgaataaatgtcatcctcttctcta

SEQ ID NO: 551 - DNA, 1173 bp, Cynomologus
cctgctgcaggatgttgcccttgttcgaggcagagacaggaggcctcagacagctgtgacagccctggagctctcctaccacatctgagccagagggaagactttggagaagcagaagcccaaagacactgctgggagattggtctgtgctctgggagaaccctaggttgtgtttcccgtgtacaagtcacggatcttctggaaggctcagttttaccgtcctatctgcagtcggctactttcggtggcagaagaggccacatctgcttcctgtaagccctctgggcagaagcatgcggtggtgtctcttcctgatctgggcccaggggctgaggcaggctcccctcgcctcaggaatgatgacaggcacaatagaaacaacggggaacatttctgcaaagaaaggtggctctgttatcttacaatgtcacctctcctccaccatggcacaagtgacccaggtcaactgggagcagcatgaccattcgcttctggccattcgtaatgctgagttggggtggcacatctacccagccttcaaggatcgagtggccccgggtcctggcctgggcctcaccctccagtcgctgaccatgaatgatacaggggagtacttctgcacctatcacacctaccctgatgggacttacagagggagaatcttcctggaggtcctagaaagctcagtggctgagcacagtgccaggttccagattccattgcttggagccatggccatgatgctggtggtcatctgcatagcagtcatcgtggtggtcgtgttggctagaaagaagaaatccctcagaatccattctgtggaaagtggcctccagagaaaatcaactggacaggaagaacagattcccagtgctccctcacccccaggaagctgtgtccaggcagaagctgcacctgctgggctctgtggagagcagcagggagatgactgtgccgagctgcatgactacttcaatgtcctgagttacagaagcctggggagctgcagcttcttcacagagactgggtagcaaacagaggcatgttctggaagatacacttttgtcttgactattatagatgtcttgactaatatataaacagctgtattcgccatcagtgtgcgcgcgcgtgtgtgttcagttgagtgaataaatgtcatcctcttctcta

SEQ ID NO: 552 - DNA, 1273 bp, Cynomologus
tcctgctgcaggatgttgcccttgttcgaggcagagacaggaggcctcagacagctgtgacagccctggagctctcctaccacatctgagccagagggaagactttggagaagcagaagcccaaagacactgctgggagattggtctgtgctctgggagaaccctaggttgtgtttcccgtgtacaagtcacggatcttctggaaggtaccaccgctcccagccccgcttggctgagggctgagggccacaggttttcgggactgtgcctgtggttggaggctgtggactcaagctcagttttaccgtcctatctgcagtcggctactttcggtggcagaagaggccacatctgcttcctgtaagccctctgggcagaagcatgcggtggtgtctcttcctgatctgggcccaggggctgaggcaggctcccctcgcctcaggaatgatgacaggcacaatagaaacaacggggaacatttctgcaaagaaaggtggctctgttatcttacaatgtcacctctcctccaccatggcacaagtgacccaggtcaactgggagcagcatgaccattcgcttctggccattcgtaatgctgagttggggtggcacatctacccagccttcaaggatcgagtggccccgggtcctggcctgggcctcaccctccagtcgctgaccatgaatgatacaggggagtacttctgcacctatcacacctaccctgatgggacttacagagggagaatcttcctggaggtcctagaaagctcagtggctgagcacagtgccaggttccagattccattgcttggagccatggccatgatgctggtggtcatctgcatagcagtcatcgtggtggtcgtgttggctagaaagaagaaatccctcagaatccattctgtggaaagtggcctccagagaaaatcaactggacaggaagaacagattcccagtgctccctcacccccaggaagctgtgtccaggcagaagctgcacctgctgggctctgtggagagcagcagggagatgactgtgccgagctgcatgactacttcaatgtcctgagttacagaagcctggggagctgcagcttcttcacagagactgggtagcaaacagagaactcactgaactagattctcctctgaggaccagagaagaccatctcatagctggattcctggagacatgcactgtccacgcgtagccactttccacgtgtggccatcaaccacttaagatggggttagtttaaatcaagatgtg

SEQ ID NO: 553 - DNA, 420 bp, Cynomologus
atgggctggtcctgcatcatcctgtttctggtggccacagccaccggcgtgcacagcatgatgaccggcaccatcgagacaaccggcaacatcagcgccaagaaaggcggcagcgtgatcctgcagtgccacctgtctagcaccatggcccaagtgacccaagtgaactgggagcagcacgaccacagcctgctggccatcagaaatgccgagctgggctggcacatctaccccgccttcaaggacagagtggcccctggacctggcctgggactgacactgcagagcctgaccatgaacgataccggcgagtacttctgcacctaccacacctaccccgacggcacctaccggggcagaatcttcctggaagtgctggaaagcagcgtggccgagcacagcgccagattccagatcccc

SEQ ID NO: 554 - protein, 158 aa, Cynomologus
MGWSCIILFLVATATGVHSMMTGTIETTGNISAKKGGSVILQCHLSSTMAQVTQVNWEQHDHSLLAIRNAELGWHIYPAFKDRVAPGPGLGLTLQSLTMNDTGEYFCTYHTYPDGTYRGRIFLEVLESSVAEHSARFQIPIEGRDYKDDDDKHHHHHH

SEQ ID NO: 555 - protein, 376 aa, Cynomologus
MGWSCIILFLVATATGVHSMMTGTIETTGNISAKKGGSVILQCHLSSTMAQVTQVNWEQHDHSLLAIRNAELGWHIYPAFKDRVAPGPGLGLTLQSLTMNDTGEYFCTYHTYPDGTYRGRIFLEVLESSVAEHSARFQIPIEGREPKSCDKTHTCPPCPAPELLGGPSVFLFPPKPKDTLMISRTPEVTCVVVDVSHEDPEVKFNWYVDGVEVHNAKTKPREEQYNSTYRVVSVLTVLHQDWLNGKEYKCKVSNKALPAPIEKTISKAKGQPREPQVYTLPPSRDELTKNQVSLTCLVKGFYPSDIAVEWESNGQPENNYKTTPPVLDSDGSFFLYSKLTVDKSRWQQGNVFSCSVMHEALHNHYTQKSLSLSPGK

SEQ ID NO: 556 - protein, 241 aa, Mus Musculus
MHGWLLLVWVQGLIQAAFLATGATAGTIDTKRNISAEEGGSVILQCHFSSDTAEVTQVDWKQQDQLLAIYSVDLGWHVASVFSDRVVPGPSLGLTFQSLTMNDTGEYFCTYHTYPGGIYKGRIFLKVQESSVAQFQTAPLGGTMAAVLGLICLMVTGVTVLARKKSIRMHSIESGLGRTEAEPQEWNLRSLSSPGSPVQTQTAPAGPCGEQAEDDYADPQEYFNVLSYRSLESFIAVSKTG

SEQ ID NO: 557 - DNA, 1006 bp, Mus Musculus
gccagtttcagttggaggagaggccacatccactttgctgtaggcctctggttagaagcatgcatggctggctgctcctggtctgggtccaggggctgatacaggctgccttcctcgctacaggagccacagcaggcacgatagatacaaagaggaacatctctgcagaggaaggtggctctgtcatcttacagtgtcacttctcctctgacacagctgaagtgacccaagtcgactggaagcagcaggaccagcttctggccatttatagtgttgacctggggtggcatgtcgcttcagtcttcagtgatcgggtggtcccaggccccagcctaggcctcaccttccagtctctgacaatgaatgacacgggagagtacttctgtacctatcatacgtatcctggtgggatttacaaggggagaatattcctgaaggtccaagaaagctcagtggctcagttccagactgccccgcttggaggaaccatggctgctgtgctgggactcatttgcttaatggtcacaggagtgactgtactggctagaaagaagtctattagaatgcattctatagaaagtggccttgggagaacagaagcggagccacaggaatggaacctgaggagtctctcatcccctggaagccctgtccagacacaaactgcccctgctggtccctgtggagagcaggcagaagatgactatgctgacccacaggaatactttaatgtcctgagctacagaagcctagagagcttcattgctgtatcgaagactggctaacgacagctctctatccctctccctatgtctctctctctgtctctctctgtctctctctgtctctgtctctgtctctgtctctctctctctctctctctctctctctgtgtgtgtgtgtgtgtatgtgtgtatacatcattaatgttcattaacactaactgcatatggtggaggaccaggaaataaaagtttgtgttgctaataaaattaagtgctaactt

SEQ ID NO: 558 - DNA, 723 bp, Mus Musculus
atgcacggatggctgctgctcgtgtgggtgcagggactgatccaggccgcttttctggccaccggcgctacagccggcaccatcgacaccaagagaaacatcagcgccgaagagggcggcagcgtgatcctgcagtgtcacttcagcagcgacaccgccgaagtgacccaggtggactggaagcagcaggaccagctgctggccatctacagcgtggacctgggctggcatgtggccagcgtgttcagcgacagagtggtgcctggccctagcctgggcctgacattccagagcctgaccatgaacgataccggcgagtacttctgcacctaccacacctaccctggcggcatctacaagggcagaatcttcctgaaggtgcaggaatccagcgtggcccagttccagacagctcctctgggcggcacaatggccgctgtgctggggctgatctgcctgatggtcaccggcgtgacagtgctggcccggaagaaatccatcagaatgcacagcatcgagtccggcctgggcagaacagaggccgagcctcaggaatggaacctgagaagcctgagcagccccggcagccctgtgcagacacagacagcaccagctggcccttgtggcgagcaggccgaggatgattacgccgacccccaggaatacttcaacgtgctgagctacagaagcctggaatcctttatcgccgtgtccaagaccggc

SEQ ID NO: 559 - protein, 249 aa, Mus Musculus
MHGWLLLVWVQGLIQAAFLATAIGATAGTIDTKRNISAEEGGSVILQCHFSSDTAEVTQVDWKQQDQLLAIYSVDLGWHVASVFSDRVVPGPSLGLTFQSLTMNDTGEYFCTYHTYPGGIYKGRIFLKVQESSDDRNGLAQFQTAPLGGTMAAVLGLICLMVTGVTVLARKDKSIRMHSIESGLGRTEAEPQEWNLRSLSSPGSPVQTQTAPAGPCGEQAEDDYADPQEYFNVLSYRSLESFIAVSKTG

SEQ ID NO: 560 - protein, 141 aa, Mus Musculus
MHGWLLLVWVQGLIQAAFLATGATAGTIDTKRNISAEEGGSVILQCHFSSDTAEVTQVDWKQQDQLLAIYSVDLGWHVASVFSDRVVPGPSLGLTFQSLTMNDTGEYFCTYHTYPGGIYKGRIFLKVQESSVAQFQTAPLG

SEQ ID NO: 561 - protein, 141 aa, Mus Musculus; identical to SEQ ID NO: 560

SEQ ID NO: 562 - protein, 358 aa, Mus Musculus
GTIDTKRNISAEEGGSVILQCHFSSDTAEVTQVDWKQQDQLLAIYSVDLGWHVASVFSDRVVPGPSLGLTFQSLTMNDTGEYFCTYHTYPGGIYKGRIFLKVQESSVAQFQTAPLGGTIEGRMDPEPRGPTIKPCPPCKCPAPNLLGGPSVFIFPPKIKDVLMISLSPIVTCVVVDVSEDDPDVQISWFVNNVEVHTAQTQTHREDYNSTLRVVSALPIQHQDWMSGKEFKCKVNNKDLPAPIERTISKPKGSVRAPQVYVLPPPEEEMTKKQVTLTCMVTDFMPEDIYVEWTNNGKTELNYKNTEPVLDSDGSYFMYSKLRVEKKNWVERNSYSCSVVHEGLHNHHTTKSFSRTPGK

SEQ ID NO: 563 - protein, 417 aa, Homo Sapien
MARAMAAAWPLLLVALLVLSWPPPGTGDVVVQAPTQVPGFLGDSVTLPCYLQVPNMEVTHVSQLTWARHGESGSMAVFHQTQGPSYSESKRLEFVAARLGAELRNASLRMFGLRVEDEGNYTCLFVTFPQGSRSVDIWLRVLAKPQNTAEVQKVQLTGEPVPMARCVSTGGRPPAQITWHSDLGGMPNTSQVPGFLSGTVTVTSLWILVPSSQVDGKNVTCKVEHESFEKPQLLTVNLTVYYPPEVSISGYDNNWYLGQNEATLTCDARSNPEPTGYNWSTTMGPLPPFAVAQGAQLLIRPVDKPINTTLICNVTNALGARQAELTVQVKEGPPSEHSGMSRNAIIFLVLGILVFLILLGIGIYFYWSKCSREVLWHCHLCPSSTEHASASANGHVSYSAVSRENSSSQDPQTEGTR

SEQ ID NO: 564 - DNA, 5903 bp, Homo Sapien
agcgggactgagcgccgggagagacctgcgcaggcgcaggcgcgcggggagggccagcctgggtggcccaccccgcgcctggcgggactggccgccaactcccctccgctccagtcacttgtctggagcttgaagaagtgggtattccccttcccaccccaggcactggaggagcggccccccggggattccaggacctgagctccgggagctggactcgcagcgaccgcggcagagcgagcgggcgccgggaagcgaggagacgcccgcgggaggcccagctgctcggagcaactggcatggcccgagccatggccgccgcgtggccgctgctgctggtggcgctactggtgctgtcctggccacccccaggaaccggggacgtcgtcgtgcaggcgcccacccaggtgcccggcttcttgggcgactccgtgacgctgccctgctacctacaggtgcccaacatggaggtgacgcatgtgtcacagctgacttgggcgcggcatggtgaatctggcagcatggccgtcttccaccaaacgcagggccccagctattcggagtccaaacggctggaattcgtggcagccagactgggcgcggagctgcggaatgcctcgctgaggatgttcgggttgcgcgtagaggatgaaggcaactacacctgcctgttcgtcacgttcccgcagggcagcaggagcgtggatatctggctccgagtgcttgccaagccccagaacacagctgaggttcagaaggtccagctcactggagagccagtgcccatggcccgctgcgtctccacagggggtcgcccgccagcccaaatcacctggcactcagacctgggcgggatgcccaatacgagccaggtgccagggttcctgtctggcacagtcactgtcaccagcctctggatattggtgccctcaagccaggtggacggcaagaatgtgacctgcaaggtggagcacgagagctttgagaagcctcagctgctgactgtgaacctcaccgtgtactaccccccagaggtatccatctctggctatgataacaactggtaccttggccagaatgaggccaccctgacctgcgatgctcgcagcaacccagagcccacaggctataattggagcacgaccatgggtcccctgccaccctttgctgtggcccagggcgcccagctcctgatccgtcctgtggacaaaccaatcaacacaactttaatctgcaacgtcaccaatgccctaggagctcgccaggcagaactgaccgtccaggtcaaagagggacctcccagtgagcactcaggcatgtcccgtaacgccatcatcttcctggttctgggaatcctggtttttctgatcctgctggggatcgggatttatttctattggtccaaatgttcccgtgaggtcctttggcactgtcatctgtgtccctcgagtacagagcatgccagcgcctcagctaatgggcatgtctcctattcagctgtgagcagagagaacagctcttcccaggatccacagacagagggcacaaggtgacagcgtcgggactgagaggggagagagactggagctggcaaggacgtgggcctccagagttggacccgaccccaatggatgaagaccccctccaaagagaccagcctccctccctgtgccagacctcaaaacgacgggggcaggtgcaagttcataggtctccaagaccaccctcctttcatttgctagaaggactcactagactcaggaaagctgttaggctcacagttacagtttattacagtaaaaggacagagattaagatcagcaaagggaggaggtgcacagcacacgttccacgacagatgaggcgacggcttccatctgccctctcccagtggagccatataggcagcacctgattctcacagcaacatgtgacaacatgcaagaagtactgccaatactgccaaccagagcagctcactcgagatctttgtgtccagagttttttgtttgtcttgagacagggtctggctctgttggcagactagagtacagtggtgagatcacagttcattgcagccttgacttctcaacgccaagtcatcctcccacctcagcctcctgagtagctatgactacaggtatgtgccaccacgtctggctaatctttttattatttgtaaagtcgaggtttccctgtgttgcccaggctggtcttgaactcttggctccaagtgatacttctgccttggcctcccaaagtgctgaattaagcagctcaccatccacacggctgacctcatacatcaagccaataccgtgtggcccaagacccccaccataaatcacatcattagcatgaaccacccagagtggcccaagactccaagatcagctaccaggcaggatattccaagggcttagagatgaatgcccaggagctgaggataaagggcccgatctttctttgggcaaggttaagcctttactgcatagcagaccacacagaagggtgtgggccaccagagaattttggtaaaaatttggcctctggccttgagcttctaaatctctgtatccgtcagatctctgtggttacaagaaacagccactgaccctggtcaccagaggctgcaattcaggccgcaagcagctgcctggggggtgtccaaggagcagagaaaactactagatgtgaacttgaagaaggttgtcagctgcagccactttctgccagcatctgcagccactttctgccagcatctgcagccagcaagctgggactggcaggaaataacccacaaaagaagcaaatgcaatttccaacacaagggggaagggatgcagggggaggcagcgctgcagttgctcaggacacgctcctataggaccaagatggatgcgacccaagacccaggaggcccagctgctcagtgcaactgacaagttaaaaaggtctatgatcttgagggcagacagcagaattcctcttataaagaaaactgtttgggaaaatacgttgagggagagaagaccttgggccaagatgctaaatgggaatgcaaagcttgagctgctctgcaagagaaaataagcaggacagaggatttgctctggacagagatggaagagccgggaacagagaagtgtggggaagagataggaaccagcaggatggcaggggcaaagggctcaagggtgaggaggccagtgggaccccacagagttggggagataaaggaacattggttgctttggtggcacgtaagctccttgtctgtctccagcacccagaatctcattaaagcttatttattgtacctccagcggctgtgtgcaatggggtcttttgtggaaatcaaggagcagacaggtttcatgtgtactgtcaccacgtgggatggaaccagaggcatggaagcaagacgctaaatgaagagggccataagggctgggattcccaggcaccttaggaacagcttgtctttttttttttcctctccaaaaaaaatgtttaagggacggtgtctcctgtcacccaggctggagtgcaatggcacgatcatagctcattgcagcctctaactccggggctcaagcaatcctcccacctcagcctaccaagtagctgtgaccacagctgcccctcaccatgctaagctaatttttttaattagatagtacataaacgtcccaaaattagaagataaaaagacatgagggatccattctaatttgtgtttggagtgtaatggtccagctccattcttctgcacatggatatccagttttacacaacactgtgaatgtaatgaatgccactgaatcatacactcaaaaatagctaaaatggcaaattgtctgttatctctttttaaccaccatttttgaaaattaattataccaaaaaaccattgaatagtgcactttatttatttatttatttgtttatttatttatttattttagaaataagagtctcactttgttgcccaggctggagtgcagtggcgtgatcatggctcattgcagcctcgacctgctgggctcgggctatccttccatctcagcctcccgagtagctgggactataggtgggcgccaccccacctggctaaatctctttttaacttttgtagagataggcatctcgctatgttgcctaggctgggctggaactcctgggctcaagtgctcctcctgccttggcctcccaaagcgctaggattacagatgtgagccaccgcgcccaccctgaaccttactttttttgctcagtttctggtaattcagagaatgcctcctgagttgttctacacccacctcatattccatgggagggctgtacagggcttttttaacgaggcctctaaggacaggcatttgtatcctttccagcctttcactattacaatgttgtagtgaataactttacacactgtcatttattttacttttttttttttttattttagagaaaggaatcttgccatcttgcccaggctggtctcaaattcctgggcccaaacaatcctcccgccttggcctcctaaagtactgggatttataggcataagccaccgtgcctggccaatgcacactgtcatttagctcatgttaacacctgagtgtaggacacactcctggaggtggaattgctgggccaaagagtatgtttcttgtcattgtgatagatattgacaaatgaaccctcacagaagttgtgctgagttctgttcccaccagcgacgtaggcgatgacctttttctggagggagggggcatccttggagtccacagagccaggaatggagagtgggcccagaattttggtataggtgttgtataaacttatagtaaggttaagaaaaccgcaactatccttatcagagacttggcggggggcagggtatgatggagatcataaggaggctaaaacactccacaccctccctctgcattgctcctgcacgggagtcgggaatcttttcaggttgatacgatctcaccttgaggagctgtgaggtcccagaagcctctgggttgcagattgcttggggtgaaaatgtctgtgctactgaaatctaactttttacaaaaaattacgggctgggcgcagtggctcacgcctgtaatcccagcactttgggaggctgcagcgggtggatcacttgaggtaaggagttcaagaccagaccatagtgaaaccgtgtctctacaaaaaaaattagccaggtgtggtggtgcatgcttgtaatcccagctactcagaaggctgaggtgggagaatcccttgaacccgggaagtggaggctggagtaaaccatgatcgagttactgcactccagcctgggtgacaagagtgagactctgtctccaaaaaaaaaaaaaaaaaaaaaaaaactggattgcctggctctactccgggcacagcatgcaggcccagttctgctgctctgctgtttgttctgctttcctccacatattggcatcaccctctggtgccaagatggctgctgcattccaggcatcacatccagactcagacccagagaagctgcccatccctacctgggtgagcctttgtaggaacgagaaaccgcatccagcagcagaaacctcacccagcagcgtcttttccggtctcattcaccagcgccgcccaccgctcaaccaatccctggccaaaagaatgggaccgcctggaaggctggaccaaacaggacctgccctctggggctggggagaggcccagatgaaggctgcaggacaggatggactcctagacctctgttaccagcagtgactacctctgtctgggtggttggaacatgtttgaattttattctaagtactgtctacaagttctgcaataaaccttgactcttcttttaataatgcaaa

SEQ ID NO: 565 - protein, 417 aa, Homo Sapien
MARAMAAAWPLLLVALLVLSWPPPGTGDVVVQAPTQVPGFLGDSVTLPCYLQVPNMEVTHVSQLTWARHGESGSMAVFHQTQGPSYSESKRLEFVAARLGAELRNASLRMFGLRVEDEGNYTCLFVTFPQGSRSVDIWLRVLAKPQNTAEVQKVQLTGEPVPMARCVSTGGRPPAQITWHSDLGGMPNTSQVPGFLSGTVTVTSLWILVPSSQVDGKNVTCKVEHESFEKPQLLTVNLTVYYPPEVSISGYDNNWYLGQNEATLTCDARSNPEPTGYNWSTTMGPLPPFAVAQGAQLLIRPVDKPINTTLICNVTNALGARQAELTVQVKEGPPSEHSGISRNAIIFLVLGILVFLILLGIGIYFYWSKCSREVLWHCHLCPSSTEHASASANGHVSYSAVSRENSSSQDPQTEGTR

SEQ ID NO: 566 - protein, 372 aa, Homo Sapien
MARAMAAAWPLLLVALLVLSWPPPGTGDVVVQAPTQVPGFLGDSVTLPCYLQVPNMEVTHVSQLTWARHGESGSMAVFHQTQGPSYSESKRLEFVAARLGAELRNASLRMFGLRVEDEGNYTCLFVTFPQGSRSVDIWLRVLAKPQNTAEVQKVQLTGEPVPMARCVSTGGRPPAQITWHSDLGGMPNTSQVPGFLSGTVTVTSLWILVPSSQVDGKNVTCKVEHESFEKPQLLTVNLTVYYPPEVSISGYDNNWYLGQNEATLTCDARSNPEPTGYNWSTTMGPLPPFAVAQGAQLLIRPVDKPINTTLICNVTNALGARQAELTVQVKEGPPSEHSGTEHASASANGHVSYSAVSRENSSSQDPQTEGTR

SEQ ID NO: 567 - DNA, 5768 bp, Homo Sapien
agcgggactgagcgccgggagagacctgcgcaggcgcaggcgcgcggggagggccagcctgggtggcccaccccgcgcctggcgggactggccgccaactcccctccgctccagtcacttgtctggagcttgaagaagtgggtattccccttcccaccccaggcactggaggagcggccccccggggattccaggacctgagctccgggagctggactcgcagcgaccgcggcagagcgagcgggcgccgggaagcgaggagacgcccgcgggaggcccagctgctcggagcaactggcatggcccgagccatggccgccgcgtggccgctgctgctggtggcgctactggtgctgtcctggccacccccaggaaccggggacgtcgtcgtgcaggcgcccacccaggtgcccggcttcttgggcgactccgtgacgctgccctgctacctacaggtgcccaacatggaggtgacgcatgtgtcacagctgacttgggcgcggcatggtgaatctggcagcatggccgtcttccaccaaacgcagggccccagctattcggagtccaaacggctggaattcgtggcagccagactgggcgcggagctgcggaatgcctcgctgaggatgttcgggttgcgcgtagaggatgaaggcaactacacctgcctgttcgtcacgttcccgcagggcagcaggagcgtggatatctggctccgagtgcttgccaagccccagaacacagctgaggttcagaaggtccagctcactggagagccagtgcccatggcccgctgcgtctccacagggggtcgcccgccagcccaaatcacctggcactcagacctgggcgggatgcccaatacgagccaggtgccagggttcctgtctggcacagtcactgtcaccagcctctggatattggtgccctcaagccaggtggacggcaagaatgtgacctgcaaggtggagcacgagagctttgagaagcctcagctgctgactgtgaacctcaccgtgtactaccccccagaggtatccatctctggctatgataacaactggtaccttggccagaatgaggccaccctgacctgcgatgctcgcagcaacccagagcccacaggctataattggagcacgaccatgggtcccctgccaccctttgctgtggcccagggcgcccagctcctgatccgtcctgtggacaaaccaatcaacacaactttaatctgcaacgtcaccaatgccctaggagctcgccaggcagaactgaccgtccaggtcaaagagggacctcccagtgagcactcaggtacagagcatgccagcgcctcagctaatgggcatgtctcctattcagctgtgagcagagagaacagctcttcccaggatccacagacagagggcacaaggtgacagcgtcgggactgagaggggagagagactggagctggcaaggacgtgggcctccagagttggacccgaccccaatggatgaagaccccctccaaagagaccagcctccctccctgtgccagacctcaaaacgacgggggcaggtgcaagttcataggtctccaagaccaccctcctttcatttgctagaaggactcactagactcaggaaagctgttaggctcacagttacagtttattacagtaaaaggacagagattaagatcagcaaagggaggaggtgcacagcacacgttccacgacagatgaggcgacggcttccatctgccctctcccagtggagccatataggcagcacctgattctcacagcaacatgtgacaacatgcaagaagtactgccaatactgccaaccagagcagctcactcgagatctttgtgtccagagttttttgtttgtcttgagacagggtctggctctgttggcagactagagtacagtggtgagatcacagttcattgcagccttgacttctcaacgccaagtcatcctcccacctcagcctcctgagtagctatgactacaggtatgtgccaccacgtctggctaatctttttattatttgtaaagtcgaggtttccctgtgttgcccaggctggtcttgaactcttggctccaagtgatacttctgccttggcctcccaaagtgctgaattaagcagctcaccatccacacggctgacctcatacatcaagccaataccgtgtggcccaagacccccaccataaatcacatcattagcatgaaccacccagagtggcccaagactccaagatcagctaccaggcaggatattccaagggcttagagatgaatgcccaggagctgaggataaagggcccgatctttctttgggcaaggttaagcctttactgcatagcagaccacacagaagggtgtgggccaccagagaattttggtaaaaatttggcctctggccttgagcttctaaatctctgtatccgtcagatctctgtggttacaagaaacagccactgaccctggtcaccagaggctgcaattcaggccgcaagcagctgcctggggggtgtccaaggagcagagaaaactactagatgtgaacttgaagaaggttgtcagctgcagccactttctgccagcatctgcagccactttctgccagcatctgcagccagcaagctgggactggcaggaaataacccacaaaagaagcaaatgcaatttccaacacaagggggaagggatgcagggggaggcagcgctgcagttgctcaggacacgctcctataggaccaagatggatgcgacccaagacccaggaggcccagctgctcagtgcaactgacaagttaaaaaggtctatgatcttgagggcagacagcagaattcctcttataaagaaaactgtttgggaaaatacgttgagggagagaagaccttgggccaagatgctaaatgggaatgcaaagcttgagctgctctgcaagagaaaataagcaggacagaggatttgctctggacagagatggaagagccgggaacagagaagtgtggggaagagataggaaccagcaggatggcaggggcaaagggctcaagggtgaggaggccagtgggaccccacagagttggggagataaaggaacattggttgctttggtggcacgtaagctccttgtctgtctccagcacccagaatctcattaaagcttatttattgtacctccagcggctgtgtgcaatggggtcttttgtggaaatcaaggagcagacaggtttcatgtgtactgtcaccacgtgggatggaaccagaggcatggaagcaagacgctaaatgaagagggccataagggctgggattcccaggcaccttaggaacagcttgtctttttttttttcctctccaaaaaaaatgtttaagggacggtgtctcctgtcacccaggctggagtgcaatggcacgatcatagctcattgcagcctctaactccggggctcaagcaatcctcccacctcagcctaccaagtagctgtgaccacagctgcccctcaccatgctaagctaatttttttaattagatagtacataaacgtcccaaaattagaagataaaaagacatgagggatccattctaatttgtgtttggagtgtaatggtccagctccattcttctgcacatggatatccagttttacacaacactgtgaatgtaatgaatgccactgaatcatacactcaaaaatagctaaaatggcaaattgtctgttatctctttttaaccaccatttttgaaaattaattataccaaaaaaccattgaatagtgcactttatttatttatttatttgtttatttatttatttattttagaaataagagtctcactttgttgcccaggctggagtgcagtggcgtgatcatggctcattgcagcctcgacctgctgggctcgggctatccttccatctcagcctcccgagtagctgggactataggtgggcgccaccccacctggctaaatctctttttaacttttgtagagataggcatctcgctatgttgcctaggctgggctggaactcctgggctcaagtgctcctcctgccttggcctcccaaagcgctaggattacagatgtgagccaccgcgcccaccctgaaccttactttttttgctcagtttctggtaattcagagaatgcctcctgagttgttctacacccacctcatattccatgggagggctgtacagggcttttttaacgaggcctctaaggacaggcatttgtatcctttccagcctttcactattacaatgttgtagtgaataactttacacactgtcatttattttacttttttttttttttattttagagaaaggaatcttgccatcttgcccaggctggtctcaaattcctgggcccaaacaatcctcccgccttggcctcctaaagtactgggatttataggcataagccaccgtgcctggccaatgcacactgtcatttagctcatgttaacacctgagtgtaggacacactcctggaggtggaattgctgggccaaagagtatgtttcttgtcattgtgatagatattgacaaatgaaccctcacagaagttgtgctgagttctgttcccaccagcgacgtaggcgatgacctttttctggagggagggggcatccttggagtccacagagccaggaatggagagtgggcccagaattttggtataggtgttgtataaacttatagtaaggttaagaaaaccgcaactatccttatcagagacttggcggggggcagggtatgatggagatcataaggaggctaaaacactccacaccctccctctgcattgctcctgcacgggagtcgggaatcttttcaggttgatacgatctcaccttgaggagctgtgaggtcccagaagcctctgggttgcagattgcttggggtgaaaatgtctgtgctactgaaatctaactttttacaaaaaattacgggctgggcgcagtggctcacgcctgtaatcccagcactttgggaggctgcagcgggtggatcacttgaggtaaggagttcaagaccagaccatagtgaaaccgtgtctctacaaaaaaaattagccaggtgtggtggtgcatgcttgtaatcccagctactcagaaggctgaggtgggagaatcccttgaacccgggaagtggaggctggagtaaaccatgatcgagttactgcactccagcctgggtgacaagagtgagactctgtctccaaaaaaaaaaaaaaaaaaaaaaaaactggattgcctggctctactccgggcacagcatgcaggcccagttctgctgctctgctgtttgttctgctttcctccacatattggcatcaccctctggtgccaagatggctgctgcattccaggcatcacatccagactcagacccagagaagctgcccatccctacctgggtgagcctttgtaggaacgagaaaccgcatccagcagcagaaacctcacccagcagcgtcttttccggtctcattcaccagcgccgcccaccgctcaaccaatccctggccaaaagaatgggaccgcctggaaggctggaccaaacaggacctgccctctggggctggggagaggcccagatgaaggctgcaggacaggatggactcctagacctctgttaccagcagtgactacctctgtctgggtggttggaacatgtttgaattttattctaagtactgtctacaagttctgcaataaaccttgactcttcttttaataatgcaaa

SEQ ID NO: 568 - protein, 364 aa, Homo Sapien
MARAMAAAWPLLLVALLVLSWPPPGTGDVVVQAPTQVPGFLGDSVTLPCYLQVPNMEVTHVSQLTWARHGESGSMAVFHQTQGPSYSESKRLEFVAARLGAELRNASLRMFGLRVEDEGNYTCLFVTFPQGSRSVDIWLRVLAKPQNTAEVQKVQLTGEPVPMARCVSTGGRPPAQITWHSDLGGMPNTSQVPGFLSGTVTVTSLWILVPSSQVDGKNVTCKVEHESFEKPQLLTVNLTVYYPPEVSISGYDNNWYLGQNEATLTCDARSNPEPTGYNWSTTMGPLPPFAVAQGAQLLIRPVDKPINTTLICNVTNALGARQAELTVQVKGTEHASASANGHVSYSAVSRENSSSQDPQTEGTR

SEQ ID NO: 569 - DNA, 5744 bp, Homo Sapien
agcgggactgagcgccgggagagacctgcgcaggcgcaggcgcgcggggagggccagcctgggtggcccaccccgcgcctggcgggactggccgccaactcccctccgctccagtcacttgtctggagcttgaagaagtgggtattccccttcccaccccaggcactggaggagcggccccccggggattccaggacctgagctccgggagctggactcgcagcgaccgcggcagagcgagcgggcgccgggaagcgaggagacgcccgcgggaggcccagctgctcggagcaactggcatggcccgagccatggccgccgcgtggccgctgctgctggtggcgctactggtgctgtcctggccacccccaggaaccggggacgtcgtcgtgcaggcgcccacccaggtgcccggcttcttgggcgactccgtgacgctgccctgctacctacaggtgcccaacatggaggtgacgcatgtgtcacagctgacttgggcgcggcatggtgaatctggcagcatggccgtcttccaccaaacgcagggccccagctattcggagtccaaacggctggaattcgtggcagccagactgggcgcggagctgcggaatgcctcgctgaggatgttcgggttgcgcgtagaggatgaaggcaactacacctgcctgttcgtcacgttcccgcagggcagcaggagcgtggatatctggctccgagtgcttgccaagccccagaacacagctgaggttcagaaggtccagctcactggagagccagtgcccatggcccgctgcgtctccacagggggtcgcccgccagcccaaatcacctggcactcagacctgggcgggatgcccaatacgagccaggtgccagggttcctgtctggcacagtcactgtcaccagcctctggatattggtgccctcaagccaggtggacggcaagaatgtgacctgcaaggtggagcacgagagctttgagaagcctcagctgctgactgtgaacctcaccgtgtactaccccccagaggtatccatctctggctatgataacaactggtaccttggccagaatgaggccaccctgacctgcgatgctcgcagcaacccagagcccacaggctataattggagcacgaccatgggtcccctgccaccctttgctgtggcccagggcgcccagctcctgatccgtcctgtggacaaaccaatcaacacaactttaatctgcaacgtcaccaatgccctaggagctcgccaggcagaactgaccgtccaggtcaaaggtacagagcatgccagcgcctcagctaatgggcatgtctcctattcagctgtgagcagagagaacagctcttcccaggatccacagacagagggcacaaggtgacagcgtcgggactgagaggggagagagactggagctggcaaggacgtgggcctccagagttggacccgaccccaatggatgaagaccccctccaaagagaccagcctccctccctgtgccagacctcaaaacgacgggggcaggtgcaagttcataggtctccaagaccaccctcctttcatttgctagaaggactcactagactcaggaaagctgttaggctcacagttacagtttattacagtaaaaggacagagattaagatcagcaaagggaggaggtgcacagcacacgttccacgacagatgaggcgacggcttccatctgccctctcccagtggagccatataggcagcacctgattctcacagcaacatgtgacaacatgcaagaagtactgccaatactgccaaccagagcagctcactcgagatctttgtgtccagagttttttgtttgtcttgagacagggtctggctctgttggcagactagagtacagtggtgagatcacagttcattgcagccttgacttctcaacgccaagtcatcctcccacctcagcctcctgagtagctatgactacaggtatgtgccaccacgtctggctaatctttttattatttgtaaagtcgaggtttccctgtgttgcccaggctggtcttgaactcttggctccaagtgatacttctgccttggcctcccaaagtgctgaattaagcagctcaccatccacacggctgacctcatacatcaagccaataccgtgtggcccaagacccccaccataaatcacatcattagcatgaaccacccagagtggcccaagactccaagatcagctaccaggcaggatattccaagggcttagagatgaatgcccaggagctgaggataaagggcccgatctttctttgggcaaggttaagcctttactgcatagcagaccacacagaagggtgtgggccaccagagaattttggtaaaaatttggcctctggccttgagcttctaaatctctgtatccgtcagatctctgtggttacaagaaacagccactgaccctggtcaccagaggctgcaattcaggccgcaagcagctgcctggggggtgtccaaggagcagagaaaactactagatgtgaacttgaagaaggttgtcagctgcagccactttctgccagcatctgcagccactttctgccagcatctgcagccagcaagctgggactggcaggaaataacccacaaaagaagcaaatgcaatttccaacacaagggggaagggatgcagggggaggcagcgctgcagttgctcaggacacgctcctataggaccaagatggatgcgacccaagacccaggaggcccagctgctcagtgcaactgacaagttaaaaaggtctatgatcttgagggcagacagcagaattcctcttataaagaaaactgtttgggaaaatacgttgagggagagaagaccttgggccaagatgctaaatgggaatgcaaagcttgagctgctctgcaagagaaaataagcaggacagaggatttgctctggacagagatggaagagccgggaacagagaagtgtggggaagagataggaaccagcaggatggcaggggcaaagggctcaagggtgaggaggccagtgggaccccacagagttggggagataaaggaacattggttgctttggtggcacgtaagctccttgtctgtctccagcacccagaatctcattaaagcttatttattgtacctccagcggctgtgtgcaatggggtcttttgtggaaatcaaggagcagacaggtttcatgtgtactgtcaccacgtgggatggaaccagaggcatggaagcaagacgctaaatgaagagggccataagggctgggattcccaggcaccttaggaacagcttgtctttttttttttcctctccaaaaaaaatgtttaagggacggtgtctcctgtcacccaggctggagtgcaatggcacgatcatagctcattgcagcctctaactccggggctcaagcaatcctcccacctcagcctaccaagtagctgtgaccacagctgcccctcaccatgctaagctaatttttttaattagatagtacataaacgtcccaaaattagaagataaaaagacatgagggatccattctaatttgtgtttggagtgtaatggtccagctccattcttctgcacatggatatccagttttacacaacactgtgaatgtaatgaatgccactgaatcatacactcaaaaatagctaaaatggcaaattgtctgttatctctttttaaccaccatttttgaaaattaattataccaaaaaaccattgaatagtgcactttatttatttatttatttgtttatttatttatttattttagaaataagagtctcactttgttgcccaggctggagtgcagtggcgtgatcatggctcattgcagcctcgacctgctgggctcgggctatccttccatctcagcctcccgagtagctgggactataggtgggcgccaccccacctggctaaatctctttttaacttttgtagagataggcatctcgctatgttgcctaggctgggctggaactcctgggctcaagtgctcctcctgccttggcctcccaaagcgctaggattacagatgtgagccaccgcgcccaccctgaaccttactttttttgctcagtttctggtaattcagagaatgcctcctgagttgttctacacccacctcatattccatgggagggctgtacagggcttttttaacgaggcctctaaggacaggcatttgtatcctttccagcctttcactattacaatgttgtagtgaataactttacacactgtcatttattttacttttttttttttttattttagagaaaggaatcttgccatcttgcccaggctggtctcaaattcctgggcccaaacaatcctcccgccttggcctcctaaagtactgggatttataggcataagccaccgtgcctggccaatgcacactgtcatttagctcatgttaacacctgagtgtaggacacactcctggaggtggaattgctgggccaaagagtatgtttcttgtcattgtgatagatattgacaaatgaaccctcacagaagttgtgctgagttctgttcccaccagcgacgtaggcgatgacctttttctggagggagggggcatccttggagtccacagagccaggaatggagagtgggcccagaattttggtataggtgttgtataaacttatagtaaggttaagaaaaccgcaactatccttatcagagacttggcggggggcagggtatgatggagatcataaggaggctaaaacactccacaccctccctctgcattgctcctgcacgggagtcgggaatcttttcaggttgatacgatctcaccttgaggagctgtgaggtcccagaagcctctgggttgcagattgcttggggtgaaaatgtctgtgctactgaaatctaactttttacaaaaaattacgggctgggcgcagtggctcacgcctgtaatcccagcactttgggaggctgcagcgggtggatcacttgaggtaaggagttcaagaccagaccatagtgaaaccgtgtctctacaaaaaaaattagccaggtgtggtggtgcatgcttgtaatcccagctactcagaaggctgaggtgggagaatcccttgaacccgggaagtggaggctggagtaaaccatgatcgagttactgcactccagcctgggtgacaagagtgagactctgtctccaaaaaaaaaaaaaaaaaaaaaaaaactggattgcctggctctactccgggcacagcatgcaggcccagttctgctgctctgctgtttgttctgctttcctccacatattggcatcaccctctggtgccaagatggctgctgcattccaggcatcacatccagactcagacccagagaagctgcccatccctacctgggtgagcctttgtaggaacgagaaaccgcatccagcagcagaaacctcacccagcagcgtcttttccggtctcattcaccagcgccgcccaccgctcaaccaatccctggccaaaagaatgggaccgcctggaaggctggaccaaacaggacctgccctctggggctggggagaggcccagatgaaggctgcaggacaggatggactcctagacctctgttaccagcagtgactacctctgtctgggtggttggaacatgtttgaattttattctaagtactgtctacaagttctgcaataaaccttgactcttcttttaataatgcaaa

SEQ ID NO: 570 - protein, 392 aa, Homo Sapien
MARAMAAAWPLLLVALLVLSWPPPGTGDVVVQAPTQVPGFLGDSVTLPCYLQVPNMEVTHVSQLTWARHGESGSMAVFHQTQGPSYSESKRLEFVAARLGAELRNASLRMFGLRVEDEGNYTCLFVTFPQGSRSVDIWLRVLAKPQNTAEVQKVQLTGEPVPMARCVSTGGRPPAQITWHSDLGGMPNTSQVPGFLSGTVTVTSLWILVPSSQVDGKNVTCKVEHESFEKPQLLTVNLTVYYPPEVSISGYDNNWYLGQNEATLTCDARSNPEPTGYNWSTTMGPLPPFAVAQGAQLLIRPVDKPINTTLICNVTNALGARQAELTVQVKEGPPSEHSGISRNAIIFLVLGILVFLILLGIGIYFYWSKCSREVLWHCHLCPSSEHHQSCRN

SEQ ID NO: 571 - DNA, 1643 bp, Homo Sapien
agcgggactgagcgccgggagagacctgcgcaggcgcaggcgcgcggggagggccagcctgggtggcccaccccgcgcctggcgggactggccgccaactcccctccgctccagtcacttgtctggagcttgaagaagtgggtattccccttcccaccccaggcactggaggagcggccccccggggattccaggacctgagctccgggagctggactcgcagcgaccgcggcagagcgagcgggcgccgggaagcgaggagacgcccgcgggaggcccagctgctcggagcaactggcatggcccgagccatggccgccgcgtggccgctgctgctggtggcgctactggtgctgtcctggccacccccaggaaccggggacgtcgtcgtgcaggcgcccacccaggtgcccggcttcttgggcgactccgtgacgctgccctgctacctacaggtgcccaacatggaggtgacgcatgtgtcacagctgacttgggcgcggcatggtgaatctggcagcatggccgtcttccaccaaacgcagggccccagctattcggagtccaaacggctggaattcgtggcagccagactgggcgcggagctgcggaatgcctcgctgaggatgttcgggttgcgcgtagaggatgaaggcaactacacctgcctgttcgtcacgttcccgcagggcagcaggagcgtggatatctggctccgagtgcttgccaagccccagaacacagctgaggttcagaaggtccagctcactggagagccagtgcccatggcccgctgcgtctccacagggggtcgcccgccagcccaaatcacctggcactcagacctgggcgggatgcccaatacgagccaggtgccagggttcctgtctggcacagtcactgtcaccagcctctggatattggtgccctcaagccaggtggacggcaagaatgtgacctgcaaggtggagcacgagagctttgagaagcctcagctgctgactgtgaacctcaccgtgtactaccccccagaggtatccatctctggctatgataacaactggtaccttggccagaatgaggccaccctgacctgcgatgctcgcagcaacccagagcccacaggctataattggagcacgaccatgggtcccctgccaccctttgctgtggcccagggcgcccagctcctgatccgtcctgtggacaaaccaatcaacacaactttaatctgcaacgtcaccaatgccctaggagctcgccaggcagaactgaccgtccaggtcaaagagggacctcccagtgagcactcaggcatgtcccgtaacgccatcatcttcctggttctgggaatcctggtttttctgatcctgctggggatcgggatttatttctattggtccaaatgttcccgtgaggtcctttggcactgtcatctgtgtccctcgagtgagcatcaccagagctgccgtaattgagcacctactacgggctctgtgctgagtccttccagtgtgcctctcactgaatcctcaccccactgccatgaggtttcccccatttgactgatgagggtgcagagccagggagccttgttcactggttcattgattacatttacaaatattatttacagagtggga

SEQ ID NO: 572 - DNA, 1008 bp, Homo Sapien
atggggtggtcttgtatcatactgtttcttgtggcaaccgcaactggtgtgcattctggagacgtagtggtccaggctcctacacaggtccccggcttccttggtgatagcgtcactctcccttgttacctgcaggtgccaaatatggaggtcactcacgtgagccaactcacctgggcacggcatggggaaagtggatctatggcagttttccaccaaactcaggggccatcttactccgagtccaaacggttggagtttgtcgctgcaagactgggcgccgagctccgtaacgcatcactccgtatgtttgggctgagagttgaagatgaaggaaactatacatgcctgttcgtgacatttccccaggggtctcggtccgtcgacatctggttgcgagtgcttgccaaaccacagaacacagcagaagtgcagaaagtgcagctcactggggaacccgtgccaatggccaggtgtgtttccaccggtggccgtcctccagcacagatcacctggcactcagatctgggcggcatgcctaacacaagtcaggtgcctggctttcttagcggcactgtgactgtgacatctctgtggatcctggtgccttctagtcaagtagacggaaagaacgtaacttgtaaagtggaacatgagagcttcgaaaagccccagttgcttacagttaacctcactgtgtactatcccccagaggtctcaatctccggctatgataacaactggtaccttgggcaaaacgaagccacactgacttgcgacgcacggtccaacccagagcccacaggatataactggagtactaccatgggcccacttcctcccttcgcagtggcccaaggcgctcagctgctgatccgtccagtggataagcctattaacactacactgatttgcaatgttacaaacgccctcggagctcgacaagcagaattgaccgtgcaggttaaagagggacccccttccgaacacagcggcatgtccaggaac

SEQ ID NO: 573 - protein, 354 aa, Homo Sapien
MGWSCIILFLVATATGVHSGDVVVQAPTQVPGFLGDSVTLPCYLQVPNMEVTHVSQLTWARHGESGSMAVFHQTQGPSYSESKRLEFVAARLGAELRNASLRMFGLRVEDEGNYTCLFVTFPQGSRSVDIWLRVLAKPQNTAEVQKVQLTGEPVPMARCVSTGGRPPAQITWHSDLGGMPNTSQVPGFLSGTVTVTSLWILVPSSQVDGKNVTCKVEHESFEKPQLLTVNLTVYYPPEVSISGYDNNWYLGQNEATLTCDARSNPEPTGYNWSTTMGPLPPFAVAQGAQLLIRPVDKPINTTLICNVTNALGARQAELTVQVKEGPPSEHSGMSRNIEGRDYKDDDDKHHHHHH

SEQ ID NO: 574 - protein, 572 aa, Homo Sapien
MGWSCIILFLVATATGVHSGDVVVQAPTQVPGFLGDSVTLPCYLQVPNMEVTHVSQLTWARHGESGSMAVFHQTQGPSYSESKRLEFVAARLGAELRNASLRMFGLRVEDEGNYTCLFVTFPQGSRSVDIWLRVLAKPQNTAEVQKVQLTGEPVPMARCVSTGGRPPAQITWHSDLGGMPNTSQVPGFLSGTVTVTSLWILVPSSQVDGKNVTCKVEHESFEKPQLLTVNLTVYYPPEVSISGYDNNWYLGQNEATLTCDARSNPEPTGYNWSTTMGPLPPFAVAQGAQLLIRPVDKPINTTLICNVTNALGARQAELTVQVKEGPPSEHSGMSRNIEGREPKSCDKTHTCPPCPAPELLGGPSVFLFPPKPKDTLMISRTPEVTCVVVDVSHEDPEVKFNWYVDGVEVHNAKTKPREEQYNSTYRVVSVLTVLHQDWLNGKEYKCKVSNKALPAPIEKTISKAKGQPREPQVYTLPPSRDELTKNQVSLTCLVKGFYPSDIAVEWESNGQPENNYKTTPPVLDSDGSFFLYSKLTVDKSRWQQGNVFSCSVMHEALHNHYTQKSLSLSPGK

SEQ ID NO: 575 - protein, 317 aa, Homo Sapien
GDVVVQAPTQVPGFLGDSVTLPCYLQVPNMEVTHVSQLTWARHGESGSMAVFHQTQGPSYSESKRLEFVAARLGAELRNASLRMFGLRVEDEGNYTCLFVTFPQGSRSVDIWLRVLAKPQNTAEVQKVQLTGEPVPMARCVSTGGRPPAQITWHSDLGGMPNTSQVPGFLSGTVTVTSLWILVPSSQVDGKNVTCKVEHESFEKPQLLTVNLTVYYPPEVSISGYDNNWYLGQNEATLTCDARSNPEPTGYNWSTTMGPLPPFAVAQGAQLLIRPVDKPINTTLICNVTNALGARQAELTVQVKEGPPSEHSGMSRN

SEQ ID NO: 576 - protein, 538 aa, Homo Sapien
MARAAALLPSRSPPTPLLWPLLLLLLLETGAQDVRVQVLPEVRGQLGGTVELPCHLLPPVPGLYISLVTWQRPDAPANHQNVAAFHPKMGPSFPSPKPGSERLSFVSAKQSTGQDTEAELQDATLALHGLTVEDEGNYTCEFATFPKGSVRGMTWLRVIAKPKNQAEAQKVTFSQDPTTVALCISKEGRPPARISWLSSLDWEAKETQVSGTLAGTVTVTSRFTLVPSGRADGVTVTCKVEHESFEEPALIPVTLSVRYPPEVSISGYDDNWYLGRTDATLSCDVRSNPEPTGYDWSTTSGTFPTSAVAQGSQLVIHAVDSLFNTTFVCTVTNAVGMGRAEQVIFVRETPNTAGAGATGGIIGGIIAAIIATAVAATGILICRQQRKEQTLQGAEEDEDLEGPPSYKPPTPKAKLEAQEMPSQLFTLGASEHSPLKTPYFDAGASCTEQEMPRYHELPTLEERSGPLHPGATSLGSPIPVPPGPPAVEDVSLDLEDEEGEEEEEYLDKINPIYDALSYSSPSDSYQGKGFVMSRAMYV

SEQ ID NO: 577 - DNA, 2869 bp, Homo Sapien
agaattctttggcaggggcgaccttagaatcctggggaggagcgagaatggaatcccggggaggaacaggggtggaatccggggggcggggtcagaacgccaggagggggcggggccggagccagggtcggcttgactcgggggagcagcgggtggatcctgtgacgtcagcgggttcgaaccgccggagctgagcgagaggccgggggtgccgagccgggcggggagagctgggccgggagagcagaacagggaggctagagcgcagcgggaaccggcccggagccggagccggagccccacaggcacctactaaaccgcccagccgatcggcccccacagagtggcccgcgggcctccggccgggcccagtcccctcccgggccctccatggcccgggccgctgccctcctgccgtcgagatcgccgccgacgccgctgctgtggccgctgctgctgctgctgctcctggaaaccggagcccaggatgtgcgagttcaagtgctacccgaggtgcgaggccagctcgggggcaccgtggagctgccgtgccacctgctgccacctgttcctggactgtacatctccctggtgacctggcagcgcccagatgcacctgcgaaccaccagaatgtggccgccttccaccctaagatgggtcccagcttccccagcccgaagcctggcagcgagcggctgtccttcgtctctgccaagcagagcactgggcaagacacagaggcagagctccaggacgccacgctggccctccacgggctcacggtggaggacgagggcaactacacttgcgagtttgccaccttccccaaggggtccgtccgagggatgacctggctcagagtcatagccaagcccaagaaccaagctgaggcccagaaggtcacgttcagccaggaccctacgacagtggccctctgcatctccaaagagggccgcccacctgcccggatctcctggctctcatccctggactgggaagccaaagagactcaggtgtcagggaccctggccggaactgtcactgtcaccagccgcttcaccttggtgccctcgggccgagcagatggtgtcacggtcacctgcaaagtggagcatgagagcttcgaggaaccagccctgatacctgtgaccctctctgtacgctaccctcctgaagtgtccatctccggctatgatgacaactggtacctcggccgtactgatgccaccctgagctgtgacgtccgcagcaacccagagcccacgggctatgactggagcacgacctcaggcaccttcccgacctccgcagtggcccagggctcccagctggtcatccacgcagtggacagtctgttcaataccaccttcgtctgcacagtcaccaatgccgtgggcatgggccgcgctgagcaggtcatctttgtccgagagacccccaacacagcaggcgcaggggccacaggcggcatcatcgggggcatcatcgccgccatcattgctactgctgtggctgccacgggcatccttatctgccggcagcagcggaaggagcagacgctgcagggggcagaggaggacgaagacctggagggacctccctcctacaagccaccgaccccaaaagcgaagctggaggcacaggagatgccctcccagctcttcactctgggggcctcggagcacagcccactcaagaccccctactttgatgctggcgcctcatgcactgagcaggaaatgcctcgataccatgagctgcccaccttggaagaacggtcaggacccttgcaccctggagccacaagcctggggtcccccatcccggtgcctccagggccacctgctgtggaagacgtttccctggatctagaggatgaggagggggaggaggaggaagagtatctggacaagatcaaccccatctatgatgctctgtcctatagcagcccctctgattcctaccagggcaaaggctttgtcatgtcccgggccatgtatgtgtgagctgccatgcgcctggcgtctcacatctcacctgttgatcccttagctttcttgccaaggatctagtgccccctgacctctggccaggccactgtcagttaacacatatgcattccatttgtgatgtctaccttggtggctccactatgacccctaacccatgagcccagagaaattcaccgtgataatggaatcctggcaaccttatctcatgaggcaggaggtggggaaggtgcttctgcacaacctctgatcccaaggactcctctcccagactgtgaccttagaccatacctctcaccccccaatgcctcgactcccccaaaatcacaaagaagaccctagacctataatttgtcttcaggtagtaaattcccaataggtctgctggagtgggcgctgagggctccctgctgctcagacctgagccctccaggcagcagggtcccacttaccccctccccaccctgttccccaaaggtgggaaagaggggattccccagcccaaggcagggttttcccagcaccctcctgtaagcagaagtctcagggtccagacccttccctgagcccccacccccaccccaattcctgcctaccaagcaagcagccccagcctagggtcagacagggtgagcctcatacagactgtgccttgatggccccagccttgggagaagaatttactgttaacctggaagactactgaatcattttacccttgcccagtggaataggacctaaacatcccccttccggggaaagtgggtcatctgaattgggggtagcaattgatactgttttgtaaactacatttcctacaaaatatgaatttatactttgaccaggaaaaaaaaaaaaa

SEQ ID NO: 578 - protein, 479 aa, Homo Sapien
MARAAALLPSRSPPTPLLWPLLLLLLLETGAQDVRVQVLPEVRGQLGGTVELPCHLLPPVPGLYISLVTWQRPDAPANHQNVAAFHPKMGPSFPSPKPGSERLSFVSAKQSTGQDTEAELQDATLALHGLTVEDEGNYTCEFATFPKGSVRGMTWLRVIAKPKNQAEAQKVTFSQDPTTVALCISKEGRPPARISWLSSLDWEAKETQVSGTLAGTVTVTSRFTLVPSGRADGVTVTCKVEHESFEEPALIPVTLSVRYPPEVSISGYDDNWYLGRTDATLSCDVRSNPEPTGYDWSTTSGTFPTSAVAQGSQLVIHAVDSLFNTTFVCTVTNAVGMGRAEQVIFVRETPRASPRDVGPLVWGAVGGTLLVLLLLAGGSLAFILLRVRRRRKSPGGAGGGASGDGGFYDPKAQVLGNGDPVFWTPVVPGPMEPDGKDEEEEEEEEKAEKGLMLPPPPALEDDMESQLDGSLISRRAVYV

SEQ ID NO: 579 - DNA, 2166 bp, Homo Sapien
agaattctttggcaggggcgaccttagaatcctggggaggagcgagaatggaatcccggggaggaacaggggtggaatccggggggcggggtcagaacgccaggagggggcggggccggagccagggtcggcttgactcgggggagcagcgggtggatcctgtgacgtcagcgggttcgaaccgccggagctgagcgagaggccgggggtgccgagccgggcggggagagctgggccgggagagcagaacagggaggctagagcgcagcgggaaccggcccggagccggagccggagccccacaggcacctactaaaccgcccagccgatcggcccccacagagtggcccgcgggcctccggccgggcccagtcccctcccgggccctccatggcccgggccgctgccctcctgccgtcgagatcgccgccgacgccgctgctgtggccgctgctgctgctgctgctcctggaaaccggagcccaggatgtgcgagttcaagtgctacccgaggtgcgaggccagctcgggggcaccgtggagctgccgtgccacctgctgccacctgttcctggactgtacatctccctggtgacctggcagcgcccagatgcacctgcgaaccaccagaatgtggccgccttccaccctaagatgggtcccagcttccccagcccgaagcctggcagcgagcggctgtccttcgtctctgccaagcagagcactgggcaagacacagaggcagagctccaggacgccacgctggccctccacgggctcacggtggaggacgagggcaactacacttgcgagtttgccaccttccccaaggggtccgtccgagggatgacctggctcagagtcatagccaagcccaagaaccaagctgaggcccagaaggtcacgttcagccaggaccctacgacagtggccctctgcatctccaaagagggccgcccacctgcccggatctcctggctctcatccctggactgggaagccaaagagactcaggtgtcagggaccctggccggaactgtcactgtcaccagccgcttcaccttggtgccctcgggccgagcagatggtgtcacggtcacctgcaaagtggagcatgagagcttcgaggaaccagccctgatacctgtgaccctctctgtacgctaccctcctgaagtgtccatctccggctatgatgacaactggtacctcggccgtactgatgccaccctgagctgtgacgtccgcagcaacccagagcccacgggctatgactggagcacgacctcaggcaccttcccgacctccgcagtggcccagggctcccagctggtcatccacgcagtggacagtctgttcaataccaccttcgtctgcacagtcaccaatgccgtgggcatgggccgcgctgagcaggtcatctttgtccgagaaacccccagggcctcgccccgagatgtgggcccgctggtgtggggggccgtgggggggacactgctggtgctgctgcttctggctggggggtccttggccttcatcctgctgagggtgaggaggaggaggaagagccctggaggagcaggaggaggagccagtggcgacgggggattctacgatccgaaagctcaggtgttgggaaatggggaccccgtcttctggacaccagtagtccctggtcccatggaaccagatggcaaggatgaggaggaggaggaggaggaagagaaggcagagaaaggcctcatgttgcctccacccccagcactcgaggatgacatggagtcccagctggacggctccctcatctcacggcgggcagtttatgtgtgacctggacacagacagagacagagccaggcccggccctcccgcccccgacctgaccacgccggcctagggttccagactggttggacttgttcgtctggacgacactggagtggaacactgcctcccactttcttgggacttggagggaggtggaacagcacactggacttctcccgtctctagggctgcatggggagcccggggagctgagtagtggggatccagagaggacccccgcccccagagacttggttttggctccagccttcccctggccccgtgacactcaggagttaataaatgccttggaggaaaacatcaaaaaaaaaaaaaaaa

SEQ ID NO: 580 - protein, 549 aa, Homo Sapien
MARTLRPSPLCPGGGKAQLSSASLLGAGLLLQPPTPPPLLLLLFPLLLFSRLCGALAGPIIVEPHVTAVWGKNVSLKCLIEVNETITQISWEKIHGKSSQTVAVHHPQYGFSVQGEYQGRVLFKNYSLNDATITLHNIGFSDSGKYICKAVTFPLGNAQSSTTVTVLVEPTVSLIKGPDSLIDGGNETVAAICIAATGKPVAHIDWEGDLGEMESTTTSFPNETATIISQYKLFPTRFARGRRITCVVKHPALEKDIRYSFILDIQYAPEVSVTGYDGNWFVGRKGVNLKCNADANPPPFKSVWSRLDGQWPDGLLASDNTLHFVHPLTFNYSGVYICKVTNSLGQRSDQKVIYISDPPTTTTLQPTIQWHPSTADIEDLATEPKKLPFPLSTLATIKDDTIATIIASVVGGALFIVLVSVLAGIFCYRRRRTFRGDYFAKNYIPPSDMQKESQIDVLQQDELDSYPDSVKKENKNPVNNLIRKDYLEEPEKTQWNNVENLNRFERPMDYYEDLKMGMKFVSDEHYDENEDDLVSHVDGSVISRREWYV

SEQ ID NO: 581 - DNA, 5265 bp, Homo Sapien
acgcgggcgggtgccgaggggaggggagtggcggcggcggcgggcggctcccgcttcagcctcggcagtggcgtcggcgacggcggtgtcgaggcagccgccagcgttcggccaagtgtcagccggcagcgacggcgctagagctgggagctggggacgcgcgcgccggaccttccacagcctccgcccagagcctgaggcgccggggccgggggagccggggggcgggcgggcgagcgggccggggggagggtgggggatggcgcggaccctgcggccgtccccgctgtgtcctggaggcggcaaagcacaactttcctccgcttctctcctcggagccgggctcctgctgcagcccccgacgccacctccgctgctgctgctgctcttcccgctgctgctcttctccaggctctgtggtgccttagctggaccaattattgtggagccacatgtcacagcagtatggggaaagaatgtttcattaaagtgtttaattgaagtaaatgaaaccataacacagatttcatgggagaagatacatggcaaaagttcacagactgttgcagttcaccatccccaatatggattctctgttcaaggagaatatcagggaagagtcttgtttaaaaattactcacttaatgatgcaacaattactctgcataacataggattctctgattctggaaaatacatctgcaaagctgttacattcccgcttggaaatgcccagtcctctacaactgtaactgtgttagttgaacccactgtgagcctgataaaagggccagattctttaattgatggaggaaatgaaacagtagcagccatttgcatcgcagccactggaaaacccgttgcacatattgactgggaaggtgatcttggtgaaatggaatccactacaacttcttttccaaatgaaacggcaacgattatcagccagtacaagctatttccaaccagatttgctagaggaaggcgaattacttgtgttgtaaaacatccagccttggaaaaggacatccgatactctttcatattagacatacagtatgctcctgaagtttcggtaacaggatatgatggaaattggtttgtaggaagaaaaggtgttaatctcaaatgtaatgctgatgcaaatccaccacccttcaaatctgtgtggagcaggttggatggacaatggcctgatggtttattggcttcagacaatactcttcattttgtccatccattgactttcaattattctggtgtttatatctgtaaagtgaccaattcccttggtcaaagaagtgaccaaaaagtcatctacatttcagatcctcctactactaccacccttcagcctacaattcagtggcatccctcaactgctgacatcgaggatctagcaacagaacctaaaaaattgcccttcccattgtcaactttggcaacaattaaggatgacacaattgccacgatcattgctagtgtagtgggtggggctctcttcatagtacttgtaagtgttttggctggaatattctgctataggagaagacggacgtttcgtggagactactttgccaagaactacattccaccatcagatatgcaaaaagaatcacaaatagatgttcttcaacaagatgagcttgattcttacccagacagtgtaaaaaaagaaaacaaaaatccagtgaacaatctaatacgtaaagactatttagaagagcctgaaaaaactcagtggaacaatgtagaaaatctcaataggtttgaaagaccaatggattattatgaagatctaaaaatgggaatgaagtttgtcagtgatgaacattatgatgaaaacgaagatgacttagtttcacatgtagatggttccgtaatttccaggagggagtggtatgtttagcaaccactgaatgtgacttaactatgtacaatgttcattcacactagttgatcattttcagattgttcatactttttcttgaggaagaataagctttttcaagttgattttcaagcttactttttatattctaatctgacaaatgaaaatgtaaaatctgagttcagtgtatctaagctgctttacaattttttttcaatgctgtactactgtctcaagatttaaattttaatgcagagtactttattggtgtgaggcacacaggtaagaagaaatgtcaacattaaatgtatgacttacttggtacaaaaattttttaaaaagggaactaccttgacattgtgtattaaatgtttacctaagactataatctcaagtatgatgtttgtttaacatatacctctcaaaatttatcaccactcaatgacactgcatcaaaattgactataaaactaattcaagaaatatttatatatattttttaatatacaaaaaatatttagcctgatggaatggctttccttttcaaacattattttctaagtttctatacaaatgaaatctttacctctgcatattaatgagccttgccataattactgtagagtggcttttcaaagatattttgttgcactaaaactgtggtagtaaactcagtgaacatgatgtgtggaagagcataattagctggtcaatatttttgtccaaaatacctgcaagagtaataaaatacatacctttcaaacatgataattattagtttttttttttcctttctggaacatggattttggtacattagcagtagccttattttaatgctttatgtcctaaacatactaatagaaatgaaaagacgcagagagagcatttcggaatactgaagtactagttttagaaatgagactttcagccaacaatctatagaaagaattttatggaccatcttgttttagttatttaatgttgatgttgttcaaatgggtaaatgtacagaaagaaaattttagagtaaacttggaactttggatataactagaaaaaactagattatagaattagtcggtaacacttgctaatggacattggcattcatctcctttttcctcctaagtgtatgtatgtgttttaagatttctgtttttacgattaaaactggaaacatgaggttttttgtttttgtttttttacataattacatatattccttctgaatcatttatcttttgagaaagaaatgttacctaaacttcaaatgtgctttttgtttgtgaggtaattaaattgcttctacagtggaggcttacaaaattattgtgacaactattttgaagctgaaaggatagtttttctattgctaagtcatttgaaaaagtgaccattttgccagtgaaatgaagtggaagttagtaggagaatcataaattaaatatattattttgttaataaaaaggcaaagtagtaggtactttttaaaccctcccaaccagccctttctcaatattcatcaaatctaaaacatttagggggcaaaattctaacatgttcatggtatcttgcaaatagtgaaagctttattctgaaggattataaactagttttcttcattttaactagcactattttgtggaaattagaaacctcttttatttctcttcccaaaagtaatacttattataaggctgtagtatcaggttaaggatacagataaataaagttcacttatatcttcttacaaatgtctgggttttaatatggttaatcacttatatacaaatattacaactttttagtgcaagtttttggaagaaaactttttgataaaacactgtgattgatgtgactttatttttaatttaaacgatgaggtggccagaagaaagatgggtctaaaatttctccccatgaaagatgtaaaactatggctttttttaaaatcaaaatttcatcttttaaaataatggtttgaaatactgtatggatctgaacagaataatcacatttaggattctatataaatctcaactggagtataatctgaaggaaattagcagtgtattttaagaaatatatttcaaaaatataaatactgattatgaacttccttttacattgtggttatttgtgcgattaggtttttttgtttgtttcttttgtgtttgtttggcgggagagggtgacctggaaagccacaagtgagtatttgacatattctgtatccttaatccaatcatttggcaaactaaaaggtttctgtgttgtaagaatctgatactagtgcttaagactttgggaagcattgcactgttgtttattagaactttatgtatatttactgtacatagagacttgtttgaaaacatgaatagtcattaaataaagacattgttaaattagtttttgaataccagtgatattcataactacttgacaggtatatatgaaaattctactatcgtgaaaaaaaatgaatatttgtactatttttggccatatttatatttatttctttcatatggtttgaactgttttagcattttgtaaattcacttgagagttttctttcatactggttaaaatatttcaatgatataatgaagatgaatgcaactcttatttttctgccattttttattaaaatacattgaaactaaagtaggctcggggttaactttaaaagtgatatttgagaagtgctttagagttgaaagatttagtattttaccacgtgcctagtagggttctatttgctaactctaatattgaggaaactattaaggttttcagtagtaagtgttgcttctaatagccatatacaggaaagttttataagataacccacggctaaatattttgcattaaggagctgtaggagtacagtgtataagtacagaaattgagagaaatgtagtcattttatatgtgaaaacatctgatttgagtttttgataaatactgctaaaacacagtatatgaacaagtaagaagtttatgtatgaaagtaatcaatgtaaaatataagaaaggaataaatggtacccattttgaatttttaattctaataggagagtagattgtagattgaattgtctttcctgtttacttgttaattagaaaatgcatccttcataaacagctcctttctcaaattttttgtatattgtgtttgtgtttgggttttagtttgtacccgcgctaagttttggttttgttgtgtttggtgttttttgttttgttttgttttgttttgttttttcttttttaaccaacctgtgtattaggtgttagccccaatagccatgcatgaaatctttaaataaaagttaaaaaagttctttagaggcaaaaaaaaaaaa

SEQ ID NO: 582 - protein, 366 aa, Homo Sapien
MARTLRPSPLCPGGGKAQLSSASLLGAGLLLQPPTPPPLLLLLFPLLLFSRLCGALAGPIIVEPHVTAVWGKNVSLKCLIEVNETITQISWEKIHGKSSQTVAVHHPQYGFSVQGEYQGRVLFKNYSLNDATITLHNIGFSDSGKYICKAVTFPLGNAQSSTTVTVLVEPTVSLIKGPDSLIDGGNETVAAICIAATGKPVAHIDWEGDLGEMESTTTSFPNETATIISQYKLFPTRFARGRRITCVVKHPALEKDIRYSFILDIQYAPEVSVTGYDGNWFVGRKGVNLKCNADANPPPFKSVWSRLDGQWPDGLLASDNTLHFVHPLTFNYSGVYICKVTNSLGQRSDQKVIYISAYNSVASLNC

SEQ ID NO: 583 - DNA, 5239 bp, Homo Sapien
acgcgggcgggtgccgaggggaggggagtggcggcggcggcgggcggctcccgcttcagcctcggcagtggcgtcggcgacggcggtgtcgaggcagccgccagcgttcggccaagtgtcagccggcagcgacggcgctagagctgggagctggggacgcgcgcgccggaccttccacagcctccgcccagagcctgaggcgccggggccgggggagccggggggcgggcgggcgagcgggccggggggagggtgggggatggcgcggaccctgcggccgtccccgctgtgtcctggaggcggcaaagcacaactttcctccgcttctctcctcggagccgggctcctgctgcagcccccgacgccacctccgctgctgctgctgctcttcccgctgctgctcttctccaggctctgtggtgccttagctggaccaattattgtggagccacatgtcacagcagtatggggaaagaatgtttcattaaagtgtttaattgaagtaaatgaaaccataacacagatttcatgggagaagatacatggcaaaagttcacagactgttgcagttcaccatccccaatatggattctctgttcaaggagaatatcagggaagagtcttgtttaaaaattactcacttaatgatgcaacaattactctgcataacataggattctctgattctggaaaatacatctgcaaagctgttacattcccgcttggaaatgcccagtcctctacaactgtaactgtgttagttgaacccactgtgagcctgataaaagggccagattctttaattgatggaggaaatgaaacagtagcagccatttgcatcgcagccactggaaaacccgttgcacatattgactgggaaggtgatcttggtgaaatggaatccactacaacttcttttccaaatgaaacggcaacgattatcagccagtacaagctatttccaaccagatttgctagaggaaggcgaattacttgtgttgtaaaacatccagccttggaaaaggacatccgatactctttcatattagacatacagtatgctcctgaagtttcggtaacaggatatgatggaaattggtttgtaggaagaaaaggtgttaatctcaaatgtaatgctgatgcaaatccaccacccttcaaatctgtgtggagcaggttggatggacaatggcctgatggtttattggcttcagacaatactcttcattttgtccatccattgactttcaattattctggtgtttatatctgtaaagtgaccaattcccttggtcaaagaagtgaccaaaaagtcatctacatttcagcctacaattcagtggcatccctcaactgctgacatcgaggatctagcaacagaacctaaaaaattgcccttcccattgtcaactttggcaacaattaaggatgacacaattgccacgatcattgctagtgtagtgggtggggctctcttcatagtacttgtaagtgttttggctggaatattctgctataggagaagacggacgtttcgtggagactactttgccaagaactacattccaccatcagatatgcaaaaagaatcacaaatagatgttcttcaacaagatgagcttgattcttacccagacagtgtaaaaaaagaaaacaaaaatccagtgaacaatctaatacgtaaagactatttagaagagcctgaaaaaactcagtggaacaatgtagaaaatctcaataggtttgaaagaccaatggattattatgaagatctaaaaatgggaatgaagtttgtcagtgatgaacattatgatgaaaacgaagatgacttagtttcacatgtagatggttccgtaatttccaggagggagtggtatgtttagcaaccactgaatgtgacttaactatgtacaatgttcattcacactagttgatcattttcagattgttcatactttttcttgaggaagaataagctttttcaagttgattttcaagcttactttttatattctaatctgacaaatgaaaatgtaaaatctgagttcagtgtatctaagctgctttacaattttttttcaatgctgtactactgtctcaagatttaaattttaatgcagagtactttattggtgtgaggcacacaggtaagaagaaatgtcaacattaaatgtatgacttacttggtacaaaaattttttaaaaagggaactaccttgacattgtgtattaaatgtttacctaagactataatctcaagtatgatgtttgtttaacatatacctctcaaaatttatcaccactcaatgacactgcatcaaaattgactataaaactaattcaagaaatatttatatatattttttaatatacaaaaaatatttagcctgatggaatggctttccttttcaaacattattttctaagtttctatacaaatgaaatctttacctctgcatattaatgagccttgccataattactgtagagtggcttttcaaagatattttgttgcactaaaactgtggtagtaaactcagtgaacatgatgtgtggaagagcataattagctggtcaatatttttgtccaaaatacctgcaagagtaataaaatacatacctttcaaacatgataattattagtttttttttttcctttctggaacatggattttggtacattagcagtagccttattttaatgctttatgtcctaaacatactaatagaaatgaaaagacgcagagagagcatttcggaatactgaagtactagttttagaaatgagactttcagccaacaatctatagaaagaattttatggaccatcttgttttagttatttaatgttgatgttgttcaaatgggtaaatgtacagaaagaaaattttagagtaaacttggaactttggatataactagaaaaaactagattatagaattagtcggtaacacttgctaatggacattggcattcatctcctttttcctcctaagtgtatgtatgtgttttaagatttctgtttttacgattaaaactggaaacatgaggttttttgtttttgtttttttacataattacatatattccttctgaatcatttatcttttgagaaagaaatgttacctaaacttcaaatgtgctttttgtttgtgaggtaattaaattgcttctacagtggaggcttacaaaattattgtgacaactattttgaagctgaaaggatagtttttctattgctaagtcatttgaaaaagtgaccattttgccagtgaaatgaagtggaagttagtaggagaatcataaattaaatatattattttgttaataaaaaggcaaagtagtaggtactttttaaaccctcccaaccagccctttctcaatattcatcaaatctaaaacatttagggggcaaaattctaacatgttcatggtatcttgcaaatagtgaaagctttattctgaaggattataaactagttttcttcattttaactagcactattttgtggaaattagaaacctcttttatttctcttcccaaaagtaatacttattataaggctgtagtatcaggttaaggatacagataaataaagttcacttatatcttcttacaaatgtctgggttttaatatggttaatcacttatatacaaatattacaactttttagtgcaagtttttggaagaaaactttttgataaaacactgtgattgatgtgactttatttttaatttaaacgatgaggtggccagaagaaagatgggtctaaaatttctccccatgaaagatgtaaaactatggctttttttaaaatcaaaatttcatcttttaaaataatggtttgaaatactgtatggatctgaacagaataatcacatttaggattctatataaatctcaactggagtataatctgaaggaaattagcagtgtattttaagaaatatatttcaaaaatataaatactgattatgaacttccttttacattgtggttatttgtgcgattaggtttttttgtttgtttcttttgtgtttgtttggcgggagagggtgacctggaaagccacaagtgagtatttgacatattctgtatccttaatccaatcatttggcaaactaaaaggtttctgtgttgtaagaatctgatactagtgcttaagactttgggaagcattgcactgttgtttattagaactttatgtatatttactgtacatagagacttgtttgaaaacatgaatagtcattaaataaagacattgttaaattagtttttgaataccagtgatattcataactacttgacaggtatatatgaaaattctactatcgtgaaaaaaaatgaatatttgtactatttttggccatatttatatttatttctttcatatggtttgaactgttttagcattttgtaaattcacttgagagttttctttcatactggttaaaatatttcaatgatataatgaagatgaatgcaactcttatttttctgccattttttattaaaatacattgaaactaaagtaggctcggggttaactttaaaagtgatatttgagaagtgctttagagttgaaagatttagtattttaccacgtgcctagtagggttctatttgctaactctaatattgaggaaactattaaggttttcagtagtaagtgttgcttctaatagccatatacaggaaagttttataagataacccacggctaaatattttgcattaaggagctgtaggagtacagtgtataagtacagaaattgagagaaatgtagtcattttatatgtgaaaacatctgatttgagtttttgataaatactgctaaaacacagtatatgaacaagtaagaagtttatgtatgaaagtaatcaatgtaaaatataagaaaggaataaatggtacccattttgaatttttaattctaataggagagtagattgtagattgaattgtctttcctgtttacttgttaattagaaaatgcatccttcataaacagctcctttctcaaattttttgtatattgtgtttgtgtttgggttttagtttgtacccgcgctaagttttggttttgttgtgtttggtgttttttgttttgttttgttttgttttgttttttcttttttaaccaacctgtgtattaggtgttagccccaatagccatgcatgaaatctttaaataaaagttaaaaaagttctttagaggcaaaaaaaaaaaa

SEQ ID NO: 584 - protein, 487 aa, Homo Sapien
MAEGWRWCFVRRTPGLLRGPLLPRSFSGNPRALAGPIIVEPHVTAVWGKNVSLKCLIEVNETITQISWEKIHGKSSQTVAVHHPQYGFSVQGEYQGRVLFKNYSLNDATITLHNIGFSDSGKYICKAVTFPLGNAQSSTTVTVLVEPTVSLIKGPDSLIDGGNETVAAICIAATGKPVAHIDWEGDLGEMESTTTSFPNETATIISQYKLFPTRFARGRRITCVVKHPALEKDIRYSFILDIQYAPEVSVTGYDGNWFVGRKGVNLKCNADANPPPFKSVWSRLDGQWPDGLLASDNTLHFVHPLTFNYSGVYICKVTNSLGQRSDQKVIYISDVPFKQTSSIAVAGAVIGAVLALFIIAIFVTVLLTPRKKRPSYLDKVIDLPPTHKPPPLYEERSPPLPQKDLFQPEHLPLQTQFKEREVGNLQHSNGLNSRSFDYEDENPVGEDGIQQMYPLYNQMCYQDRSPGKHHQNNDPKRVYIDPREHYV

SEQ ID NO: 585 - DNA, 2522 bp, Homo Sapien
aggctctgtggtaggtgaacctcggcggccggcgtgggctgagggagccgccactgagggtgcgggcgccgcggccggctctgccagccgttctctggagcagcgaggcggttggttgtgcgagcgagtgccgaggactttggctggaaacttttcgccgcgcccggggcgaggccctggaagggccaggccagcgaatgctgagccggcggcccgctgccctcccccgcggccgcgcgggtcgccgtgcggatggccgagggttggcgatggtgcttcgtgcgccgaactccgggtttgctccggggaccgttacttcctcgctcattctctgggaaccctcgtgccttagctggaccaattattgtggagccacatgtcacagcagtatggggaaagaatgtttcattaaagtgtttaattgaagtaaatgaaaccataacacagatttcatgggagaagatacatggcaaaagttcacagactgttgcagttcaccatccccaatatggattctctgttcaaggagaatatcagggaagagtcttgtttaaaaattactcacttaatgatgcaacaattactctgcataacataggattctctgattctggaaaatacatctgcaaagctgttacattcccgcttggaaatgcccagtcctctacaactgtaactgtgttagttgaacccactgtgagcctgataaaagggccagattctttaattgatggaggaaatgaaacagtagcagccatttgcatcgcagccactggaaaacccgttgcacatattgactgggaaggtgatcttggtgaaatggaatccactacaacttcttttccaaatgaaacggcaacgattatcagccagtacaagctatttccaaccagatttgctagaggaaggcgaattacttgtgttgtaaaacatccagccttggaaaaggacatccgatactctttcatattagacatacagtatgctcctgaagtttcggtaacaggatatgatggaaattggtttgtaggaagaaaaggtgttaatctcaaatgtaatgctgatgcaaatccaccacccttcaaatctgtgtggagcaggttggatggacaatggcctgatggtttattggcttcagacaatactcttcattttgtccatccattgactttcaattattctggtgtttatatctgtaaagtgaccaattcccttggtcaaagaagtgaccaaaaagtcatctacatttcagatgttccatttaagcagacctcttccatagctgtagctggagcggtaattggagctgttcttgcccttttcatcattgctatctttgtgactgtgctgctgactcctcgaaaaaaaagaccatcctatcttgacaaagtgattgaccttccacccacacataaaccacctcctctgtatgaagaacgatccccacctttgcctcagaaagacctatttcagcctgaacacttgcctttgcagactcagttcaaagaaagagaagttggcaatcttcagcactctaatggactaaatagcaggagttttgactatgaagatgagaatccagttggggaagatggcattcagcagatgtaccccctttacaatcaaatgtgctaccaagaccggagccctggcaaacatcatcaaaataacgaccctaagagagtctacatcgacccacgagaacattatgtgtgatttttctctttttccaatgggcgttctaacaaatgtttattcttagattggggagagaagctaaggccaatagttattttactgtctctcatataagaacagtcccactctaagggtattggaagtcttaatgaatgacgtaaagccaatagcaaatttcttttcttcattaagcgtttcttaaccaccagctgtgtttgtgaacttgactatagctttgtgtgtttctgtgatgatggtatttaactgctaacatttggcctacaatggcattttcatttaacagtacagcatctgcctgtgataactgcagtgattctccagaaagaaaggccccagctgatactattaacctcgttgggtctcaggcatgctagcctgttcatctgtaattcacacaggcataaaaatgagttcagaatctatttcactaattatttagctgggatttggatttccctgacatgcttaatacaattacaatacctgtgtacaaacagaggcctgaggaaagaggcaaaatttgcttttcatccaaacagcaacaaaaggcagttgaaaccttcaagcctgttggttgcttttaaacctttgtgttattatgatatatattctttgttgagcactgaggtcctgagggatacatatctcttgctgttttctgcctacttttgactagctgtatgtaacaaaggctctacttttgctctgtcactgttcctacagtcctgttctttactagctagattagcctattttgcacctattaaattctaaaaaccttgtttaaaaaaaaaaaaaaaaaa

SEQ ID NO: 586 - protein, 336 aa, Homo Sapien
MDYPTLLLALLHVYRALCEEVLWHTSVPFAENMSLECVYPSMGILTQVEWFKIGTQQDSIAIFSPTHGMVIRKPYAERVYFLNSTMASNNMTLFFRNASEDDVGYYSCSLYTYPQGTWQKVIQVVQSDSFEAAVPSNSHIVSEPGKNVTLTCQPQMTWPVQAVRWEKIQPRQIDLLTYCNLVHGRNFTSKFPRQIVSNCSHGRWSVIVIPDVTVSDSGLYRCYLQASAGENETFVMRLTVAEGKTDNQYTLFVAGGTVLLLLFVISITTIIVIFLNRRRRRERRDLFTESWDTQKAPNNYRSPISTSQPTNQSMDDTREDIYVNYPTFSRRPKTRV

SEQ ID NO: 587 - DNA, 2844 bp, Homo Sapien
tagaacaaaggagaagtgcgtcctttcaaattatagattctttgggggaaaagagggacagaactttatctgagtttggaatgagtctgagtagctgcaatagtaaagttgcttccagaagcaggtaaacttgacttcaaaaaaccccgcttcatgaaatattagtgattcacttcagttgctatctgaggaagttctggtagagagaagagctcaagagcatgggcagagtcagctcctgagtgggctgaacgctcccctcagctcctgcagtgctaattaagggagggagcagcggggagcttgcagtgaccaagagggtgttgaggctaggaggccacgataaacaggatacgataaaagtccttaaccaagacgcagatgggaagaagcgttagagcgagcagcactcacatctcaagaaccagcctttcaaacagtttccagagatggattatcctactttacttttggctcttcttcatgtatacagagctctatgtgaagaggtgctttggcatacatcagttccctttgccgagaacatgtctctagaatgtgtgtatccatcaatgggcatcttaacacaggtggagtggttcaagatcgggacccagcaggattccatagccattttcagccctactcatggcatggtcataaggaagccctatgctgagagggtttactttttgaattcaacgatggcttccaataacatgactcttttctttcggaatgcctctgaagatgatgttggctactattcctgctctctttacacttacccacagggaacttggcagaaggtgatacaggtggttcagtcagatagttttgaggcagctgtgccatcaaatagccacattgtttcggaacctggaaagaatgtcacactcacttgtcagcctcagatgacgtggcctgtgcaggcagtgaggtgggaaaagatccagccccgtcagatcgacctcttaacttactgcaacttggtccatggcagaaatttcacctccaagttcccaagacaaatagtgagcaactgcagccacggaaggtggagcgtcatcgtcatccccgatgtcacagtctcagactcggggctttaccgctgctacttgcaggccagcgcaggagaaaacgaaaccttcgtgatgagattgactgtagccgagggtaaaaccgataaccaatataccctctttgtggctggagggacagttttattgttgttgtttgttatctcaattaccaccatcattgtcattttccttaacagaaggagaaggagagagagaagagatctatttacagagtcctgggatacacagaaggcacccaataactatagaagtcccatctctaccagtcaacctaccaatcaatccatggatgatacaagagaggatatttatgtcaactatccaaccttctctcgcagaccaaagactagagtttaagcttattcttgacatgagtgcattagtaatgactcttatgtactcatgcatggatctttatgcaatttttttccactacccaaggtctaccttagatactagttgtctgaattgagttactttgataggaaaaatacttcattacctaaaatcatttttcatagaactgtttcagaaaacctgactctaactggtttatatacaaaagaaaacttactgtatcatataacagaatgatccaggggagattaagctttgggcaagggctatttaccagggcttaaatgttgtgtctagaattaagtatgggcataaactggcttctgaatccctttccagagtgttggatccatttccctggtcttggcctcactctcatgcaggctttcctcttgtgttggcaagatggctgccaactcttggcaattcatacatccttgtttctgtctggtagagagtttgcttctcaaatggagcaaacaaatttgattattttttcattgttaaataggcaacatgaccagaaaggatggaatggcttaagtaaactaagggttcacttctagagctgagaagcagggtcaaagcacaatactgggcaattcagagcatggttagaagaggaaaggggagtctcaaagctggagagtttaccaacaaatattgactgcagtgattaaccaagacatttttgttaactaaaaagtgaaatatgggatggattctagaaatggggtatctctgtccatacttctagaatccactctatcagcatagtccagaagaatacctggcagtagaagaaatgaatattcaagaggaagataaatgcgagagggcaatcctttactattctcatatttatttatctctcattctgtatagaattcttgccgccatcccaggtctagccttaggagcaaatgtagtagatagtcgaataataaataacttaatgttttggacatattttgtctacttttgagaattatttttaatatgtaaattctctcaaaagggtcaggcacctagttattattttttaatgattatgtgaaagttgaatataatataccactaaaagtgacagttgaaagtggtggcataggacggtagggtagaaatttgggagggaaaaaagaaattgggagggtacaggcaacaggagaaaggaatcaaaccacagaaaaatacaaagggaaacttctgcttcactattcagacaaagacagccctaatgacatcaccaacagtcaaagcaattagagaccatacctaatattgtttaaattctagatgtaggctaacaatgaaaagtatttgccaaactgaataaaactgtcatggttaccttgaaaaaaaaaaaaaaaaaaaaaaaaaaaaa

SEQ ID NO: 588 - DNA, 2842 bp, Homo Sapien
atgcatgcaccacctttcacttattatttatatttttacatctttattttagtttctgcctcctccacatagaatgtaagttctatcatggcaatatttttttttttttgtattattgtatcctcattgcctacagctgagttaggcacagagaatgcatgcagcacatgtttgttgaatgaatgactccttgtagaaaatgaaagcccgaaaataagccgactggttccccgagagagaagaaactcaaatctgcccatcctcataaaggagcaaacctgtcttttaagctaaggcctttttcctgtgttcatacttcagaaaaagaagacacgactgataacatctgagaggaaggaaactgcattgtgctggggatctgcatgtcacattataaaaagcaatttttttttttaatagaaccagcctttcaaacagtttccagagatggattatcctactttacttttggctcttcttcatgtatacagagctctatgtgaagaggtgctttggcatacatcagttccctttgccgagaacatgtctctagaatgtgtgtatccatcaatgggcatcttaacacaggtggagtggttcaagatcgggacccagcaggattccatagccattttcagccctactcatggcatggtcataaggaagccctatgctgagagggtttactttttgaattcaacgatggcttccaataacatgactcttttctttcggaatgcctctgaagatgatgttggctactattcctgctctctttacacttacccacagggaacttggcagaaggtgatacaggtggttcagtcagatagttttgaggcagctgtgccatcaaatagccacattgtttcggaacctggaaagaatgtcacactcacttgtcagcctcagatgacgtggcctgtgcaggcagtgaggtgggaaaagatccagccccgtcagatcgacctcttaacttactgcaacttggtccatggcagaaatttcacctccaagttcccaagacaaatagtgagcaactgcagccacggaaggtggagcgtcatcgtcatccccgatgtcacagtctcagactcggggctttaccgctgctacttgcaggccagcgcaggagaaaacgaaaccttcgtgatgagattgactgtagccgagggtaaaaccgataaccaatataccctctttgtggctggagggacagttttattgttgttgtttgttatctcaattaccaccatcattgtcattttccttaacagaaggagaaggagagagagaagagatctatttacagagtcctgggatacacagaaggcacccaataactatagaagtcccatctctaccagtcaacctaccaatcaatccatggatgatacaagagaggatatttatgtcaactatccaaccttctctcgcagaccaaagactagagtttaagcttattcttgacatgagtgcattagtaatgactcttatgtactcatgcatggatctttatgcaatttttttccactacccaaggtctaccttagatactagttgtctgaattgagttactttgataggaaaaatacttcattacctaaaatcatttttcatagaactgtttcagaaaacctgactctaactggtttatatacaaaagaaaacttactgtatcatataacagaatgatccaggggagattaagctttgggcaagggctatttaccagggcttaaatgttgtgtctagaattaagtatgggcataaactggcttctgaatccctttccagagtgttggatccatttccctggtcttggcctcactctcatgcaggctttcctcttgtgttggcaagatggctgccaactcttggcaattcatacatccttgtttctgtctggtagagagtttgcttctcaaatggagcaaacaaatttgattattttttcattgttaaataggcaacatgaccagaaaggatggaatggcttaagtaaactaagggttcacttctagagctgagaagcagggtcaaagcacaatactgggcaattcagagcatggttagaagaggaaaggggagtctcaaagctggagagtttaccaacaaatattgactgcagtgattaaccaagacatttttgttaactaaaaagtgaaatatgggatggattctagaaatggggtatctctgtccatacttctagaatccactctatcagcatagtccagaagaatacctggcagtagaagaaatgaatattcaagaggaagataaatgcgagagggcaatcctttactattctcatatttatttatctctcattctgtatagaattcttgccgccatcccaggtctagccttaggagcaaatgtagtagatagtcgaataataaataacttaatgttttggacatattttgtctacttttgagaattatttttaatatgtaaattctctcaaaagggtcaggcacctagttattattttttaatgattatgtgaaagttgaatataatataccactaaaagtgacagttgaaagtggtggcataggacggtagggtagaaatttgggagggaaaaaagaaattgggagggtacaggcaacaggagaaaggaatcaaaccacagaaaaatacaaagggaaacttctgcttcactattcagacaaagacagccctaatgacatcaccaacagtcaaagcaattagagaccatacctaatattgtttaaattctagatgtaggctaacaatgaaaagtatttgccaaactgaataaaactgtcatggttaccttgaaaaaaaaaaaaaaaaaaaaaaaaaaaaa

SEQ ID NO: 589 - protein, 181 aa, Homo Sapien
MTWPVQAVRWEKIQPRQIDLLTYCNLVHGRNFTSKFPRQIVSNCSHGRWSVIVIPDVTVSDSGLYRCYLQASAGENETFVMRLTVAEGKTDNQYTLFVAGGTVLLLLFVISITTIIVIFLNRRRRRERRDLFTESWDTQKAPNNYRSPISTSQPTNQSMDDTREDIYVNYPTFSRRPKTRV

SEQ ID NO: 590 - DNA, 2435 bp, Homo Sapien
tagaacaaaggagaagtgcgtcctttcaaattatagattctttgggggaaaagagggacagaactttatctgagtttggaatgagtctgagtagctgcaatagtaaagttgcttccagaagcaggtaaacttgacttcaaaaaaccccgcttcatgaaatattagtgattcacttcagttgctatctgaggaagttctggtagagagaagagctcaagagcatgggcagagtcagctcctgagtgggctgaacgctcccctcagctcctgcagtgctaattaagggagggagcagcggggagcttgcagtgaccaagagggtgttgaggctaggaggccacgataaacaggatacgataaaagtccttaaccaagacgcagatgggaagaagcgttagagcgagcagcactcacatctcaagatagttttgaggcagctgtgccatcaaatagccacattgtttcggaacctggaaagaatgtcacactcacttgtcagcctcagatgacgtggcctgtgcaggcagtgaggtgggaaaagatccagccccgtcagatcgacctcttaacttactgcaacttggtccatggcagaaatttcacctccaagttcccaagacaaatagtgagcaactgcagccacggaaggtggagcgtcatcgtcatccccgatgtcacagtctcagactcggggctttaccgctgctacttgcaggccagcgcaggagaaaacgaaaccttcgtgatgagattgactgtagccgagggtaaaaccgataaccaatataccctctttgtggctggagggacagttttattgttgttgtttgttatctcaattaccaccatcattgtcattttccttaacagaaggagaaggagagagagaagagatctatttacagagtcctgggatacacagaaggcacccaataactatagaagtcccatctctaccagtcaacctaccaatcaatccatggatgatacaagagaggatatttatgtcaactatccaaccttctctcgcagaccaaagactagagtttaagcttattcttgacatgagtgcattagtaatgactcttatgtactcatgcatggatctttatgcaatttttttccactacccaaggtctaccttagatactagttgtctgaattgagttactttgataggaaaaatacttcattacctaaaatcatttttcatagaactgtttcagaaaacctgactctaactggtttatatacaaaagaaaacttactgtatcatataacagaatgatccaggggagattaagctttgggcaagggctatttaccagggcttaaatgttgtgtctagaattaagtatgggcataaactggcttctgaatccctttccagagtgttggatccatttccctggtcttggcctcactctcatgcaggctttcctcttgtgttggcaagatggctgccaactcttggcaattcatacatccttgtttctgtctggtagagagtttgcttctcaaatggagcaaacaaatttgattattttttcattgttaaataggcaacatgaccagaaaggatggaatggcttaagtaaactaagggttcacttctagagctgagaagcagggtcaaagcacaatactgggcaattcagagcatggttagaagaggaaaggggagtctcaaagctggagagtttaccaacaaatattgactgcagtgattaaccaagacatttttgttaactaaaaagtgaaatatgggatggattctagaaatggggtatctctgtccatacttctagaatccactctatcagcatagtccagaagaatacctggcagtagaagaaatgaatattcaagaggaagataaatgcgagagggcaatcctttactattctcatatttatttatctctcattctgtatagaattcttgccgccatcccaggtctagccttaggagcaaatgtagtagatagtcgaataataaataacttaatgttttggacatattttgtctacttttgagaattatttttaatatgtaaattctctcaaaagggtcaggcacctagttattattttttaatgattatgtgaaagttgaatataatataccactaaaagtgacagttgaaagtggtggcataggacggtagggtagaaatttgggagggaaaaaagaaattgggagggtacaggcaacaggagaaaggaatcaaaccacagaaaaatacaaagggaaacttctgcttcactattcagacaaagacagccctaatgacatcaccaacagtcaaagcaattagagaccatacctaatattgtttaaattctagatgtaggctaacaatgaaaagtatttgccaaactgaataaaactgtcatggttaccttgaaaaaaaaaaaaaaaaaaaaaaaaaaaaa

SEQ ID NO: 591 - protein, 585 aa, Homo Sapien
MEKKWKYCAVYYIIQIHFVKGVWEKTVNTEENVYATLGSDVNLTCQTQTVGFFVQMQWSKVTNKIDLIAVYHPQYGFYCAYGRPCESLVTFTETPENGSKWTLHLRNMSCSVSGRYECMLVLYPEGIQTKIYNLLIQTHVTADEWNSNHTIEIEINQTLEIPCFQNSSSKISSEFTYAWSVENSSTDSWVLLSKGIKEDNGTQETLISQNHLISNSTLLKDRVKLGTDYRLHLSPVQIFDDGRKFSCHIRVGPNKILRSSTTVKVFAKPEIPVIVENNSTDVLVERRFTCLLKNVFPKANITWFIDGSFLHDEKEGIYITNEERKGKDGFLELKSVLTRVHSNKPAQSDNLTIWCMALSPVPGNKVWNISSEKITFLLGSEISSTDPPLSVTESTLDTQPSPASSVSPARYPATSSVTLVDVSALRPNTTPQPSNSSMTTRGFNYPWTSSGTDTKKSVSRIPSETYSSSPSGAGSTLHDNVFTSTARAFSEVPTTANGSTKTNHVHITGIVVNKPKDGMSWPVIVAALLFCCMILFGLGVRKWCQYQKEIMERPPPFKPPPPPIKYTCIQEPNESDLPYHEMETL

SEQ ID NO: 592 - DNA, 4481 bp, Homo Sapien
ttcctgtctacgtttcatttcctgggggcttgccaagtgataaacagacccaggcgtgtgtggtagagttcgggttttttagcacgaagtgggtggctggagtttgcttgaaaacatcaattgactttgtgatcattacagaaatgctggtgtaaggtgttcagaagacaatggagaaaaaatggaaatactgtgctgtctattacatcatccagatacattttgtcaagggagtttgggaaaaaacagtcaacacagaagaaaatgtttatgctacacttggctctgatgtcaacctgacctgccaaacacagacagtaggcttcttcgtgcagatgcaatggtccaaggtcaccaataagatagacctgattgctgtctatcatccccaatacggcttctactgtgcctatgggagaccctgtgagtcacttgtgactttcacagaaactcctgagaatgggtcaaaatggactctgcacttaaggaatatgtcttgttcagtcagtggaaggtacgagtgtatgcttgttctgtatccagagggcattcagactaaaatctacaaccttctcattcagacacacgttacagcagatgaatggaacagcaaccatacgatagaaatagagataaatcagactctggaaataccatgctttcaaaatagctcctcaaaaatttcatctgagttcacctatgcatggtcggtggaaaacagcagcacggattcttgggtccttctttctaagggtataaaggaggataatggaactcaggaaacacttatctcccaaaatcacctcatcagcaattccacattacttaaagatagagtcaagcttggtacagactacagactccacctctctccagtccaaatcttcgatgatgggcggaagttctcttgccacattagagtcggtcctaacaaaatcttgaggagctccaccacagtcaaggtttttgctaaaccagaaatccctgtgattgtggaaaataactccacggatgtcttggtagagagaagatttacctgcttactaaagaatgtatttcccaaagcaaatatcacatggtttatagatggaagttttcttcatgatgaaaaagaaggaatatatattactaatgaagagagaaaaggcaaagatggatttttggaactgaagtctgttttaacaagggtacatagtaataaaccagcccaatcagacaacttgaccatttggtgtatggctctgtctccagtcccaggaaataaagtgtggaacatctcatcagaaaagatcacttttctcttaggttctgaaatttcctcaacagaccctccactgagtgttacagaatctacccttgacacccaaccttctccagccagcagtgtatctcctgcaagatatccagctacatcttcagtgacccttgtagatgtgagtgccttgaggccaaacaccactcctcaacccagcaattccagtatgactacccgaggcttcaactatccctggacctccagtgggacagataccaaaaaatcagtttcacggatacctagtgaaacatacagttcatccccgtcaggtgcaggctcaacacttcatgacaatgtctttaccagcacagccagagcattttcagaagtccccacaactgccaatggatctacgaaaactaatcacgtccatatcactggtattgtggtcaataagcccaaagatggaatgtcctggccagtgattgtagcagctttactcttttgctgcatgatattgtttggtcttggagtgagaaaatggtgtcagtaccaaaaagaaataatggaaagacctccacctttcaagccaccaccacctcccatcaagtacacttgcattcaagagcccaacgaaagtgatctgccttatcatgagatggagaccctctagtctcgtgagactttgccccatggcagaactctgctggaatcctattgagaaggtagacattgtgctttattaatatagtcgctcttcagccatgcctttgctgcagctgaaatggaagtcagaagtgagtgacctgttttcccagcaactcaccctcttccatctccaaacgcctgaagcttaaccaagagtgagaggatatgtcatgttcacactcaatgcaattcgtagtggttttcttgcttatgtaagaagtacatattagtctgccatctttaaaaaaaaatacagtattttcatttaaattctctgatggagggacaacaatggtttcaactgtatgcccatgcctgatcctcttatttgaacatctatcaacattgtaaactctttgccaaaatcctggggctttgctgcattccctaagataattacaggaaaaagaaaatgtaaaagtgctaacaaggctgccaagtaatggagaagtatggttagtcttcatattgaaattctgttgcttattttcatggaaggaaacagaatactttgcacaggaaccacattttcaatcctccttcactgtcttcctaccatgttcagcccagactcctgccacatggaccaggatgaagagggatcaaagagataattagccaaaaacccagtagcctagaagatacaaaactccactggcctctaaaattatattagccaagagtggtttcatttgagtgccttcgtgtgtatgtccatcaaactggaaccaaactgttttgtaagtaaacaggcagcctaagcccaaccctactttctaattccagttattctctttttcatctggggatttacctgttcatttaatctgcctgttttgatctgttttgaaaaagataaagagcctcaaatcagaccagcactgattaattaaccctgctcctaccaatcttttttaaagcagttgaagcagaatgtataggtgtcagagaagaaacctagtcagccagacgtgctctgtattcagcaatagtttgtgaatgaataaattactaatcctccttgtcgcttgaaaccttcccacactccctgctccaggagggaaaaacagatgttgttgacagatagagtgataggcaaattctgtgtggactttagtcccaaaaggaaactttagttcacttgcagtatgcttatccttgactgcacatgagaatgccttgtgcagagttatttggagattatgtctttttcttaaacaccatggctgtcacacttcagttcaattaaatcagaatgtctgaggagtgagacacaggcatcaacactctcaaatgattcacatgttcagccaaagttgagaaccatcgagcctgtggaagttctttctcatggctcagaatcttaggtaggtgcttaactcttgtggtggccagcctccaagatgagccccagtgttcttgcctcctactattcacatctttatgtggtcccctccaatgctgaatacagatgatttgtgtaacctgaggccaggattaaggggaggcaatcaatgcacctagggaaaaaatttaaggaggtattcacactcagggtcatgcacttgcacaatgttgagaatgagtaccactctcaccattggtatagccaaaaaagcttggaagtgaccaaggctaggtcacaaaatacactgtggcttcttctttgatctctctttgaccatactgacactgggaaaagcccattcccatgccatgaagacaccaaggcagccctattgagaaatctacctgtcgtggccgggcgcagtggctcacgcctgtaatcccagcactttgggaggccgaggtgggtggatcacgaggtcaggagatcgagaccatcctggctaacacagtgaaaccccgtctctactaaaaatacaaaaaattagccgggtgtggtgtcgggcacctgtagtcccagctactcaggaggctgaggcaggagaagggtgggaacccgggaggcagagcttgcagtgagccgagattgtgccactgcacactccaatctgggtgaaagaccgagactccgcctcaaaaaaaaaaaaaaaagaaagaaagaaagaaagaaagaaatctacctgtcaaggaactaaggtattttgctaacaagcaccaacttgccagccatgtaagggagccatcttggaagcagatcctccagcctccagtcaagtcttcagataattgcaacttcagttgatcttttgaccaagacctcaagagagccagaactacccagctaagccttttactaaatttctgaacttctaacactattagataataagtgcttattgtttaacaccattaattttgagtataatttgttacatagcgacagataactatacagctcaacaactagaaaaataaactgtttacctgccttaattatttatctttagttccttattagttctcaagaaacaaatgctagcttcatatgtatggctgttgctttgcttcatgtgtatggctatttgtatttaacaagacttaatcatcagta

SEQ ID NO: 593 - protein, 569 aa, Homo Sapien
MEKKWKYCAVYYIIQIHFVKGVWEKTVNTEENVYATLGSDVNLTCQTQTVGFFVQMQWSKVTNKIDLIAVYHPQYGFYCAYGRPCESLVTFTETPENGSKWTLHLRNMSCSVSGRYECMLVLYPEGIQTKIYNLLIQTHVTADEWNSNHTIEIEINQTLEIPCFQNSSSKISSEFTYAWSVEDNGTQETLISQNHLISNSTLLKDRVKLGTDYRLHLSPVQIFDDGRKFSCHIRVGPNKILRSSTTVKVFAKPEIPVIVENNSTDVLVERRFTCLLKNVFPKANITWFIDGSFLHDEKEGIYITNEERKGKDGFLELKSVLTRVHSNKPAQSDNLTIWCMALSPVPGNKVWNISSEKITFLLGSEISSTDPPLSVTESTLDTQPSPASSVSPARYPATSSVTLVDVSALRPNTTPQPSNSSMTTRGFNYPWTSSGTDTKKSVSRIPSETYSSSPSGAGSTLHDNVFTSTARAFSEVPTTANGSTKTNHVHITGIVVNKPKDGMSWPVIVAALLFCCMILFGLGVRKWCQYQKEIMERPPPFKPPPPPIKYTCIQEPNESDLPYHEMETL

SEQ ID NO: 594 - DNA, 4433 bp, Homo Sapien
ttcctgtctacgtttcatttcctgggggcttgccaagtgataaacagacccaggcgtgtgtggtagagttcgggttttttagcacgaagtgggtggctggagtttgcttgaaaacatcaattgactttgtgatcattacagaaatgctggtgtaaggtgttcagaagacaatggagaaaaaatggaaatactgtgctgtctattacatcatccagatacattttgtcaagggagtttgggaaaaaacagtcaacacagaagaaaatgtttatgctacacttggctctgatgtcaacctgacctgccaaacacagacagtaggcttcttcgtgcagatgcaatggtccaaggtcaccaataagatagacctgattgctgtctatcatccccaatacggcttctactgtgcctatgggagaccctgtgagtcacttgtgactttcacagaaactcctgagaatgggtcaaaatggactctgcacttaaggaatatgtcttgttcagtcagtggaaggtacgagtgtatgcttgttctgtatccagagggcattcagactaaaatctacaaccttctcattcagacacacgttacagcagatgaatggaacagcaaccatacgatagaaatagagataaatcagactctggaaataccatgctttcaaaatagctcctcaaaaatttcatctgagttcacctatgcatggtcggtggaggataatggaactcaggaaacacttatctcccaaaatcacctcatcagcaattccacattacttaaagatagagtcaagcttggtacagactacagactccacctctctccagtccaaatcttcgatgatgggcggaagttctcttgccacattagagtcggtcctaacaaaatcttgaggagctccaccacagtcaaggtttttgctaaaccagaaatccctgtgattgtggaaaataactccacggatgtcttggtagagagaagatttacctgcttactaaagaatgtatttcccaaagcaaatatcacatggtttatagatggaagttttcttcatgatgaaaaagaaggaatatatattactaatgaagagagaaaaggcaaagatggatttttggaactgaagtctgttttaacaagggtacatagtaataaaccagcccaatcagacaacttgaccatttggtgtatggctctgtctccagtcccaggaaataaagtgtggaacatctcatcagaaaagatcacttttctcttaggttctgaaatttcctcaacagaccctccactgagtgttacagaatctacccttgacacccaaccttctccagccagcagtgtatctcctgcaagatatccagctacatcttcagtgacccttgtagatgtgagtgccttgaggccaaacaccactcctcaacccagcaattccagtatgactacccgaggcttcaactatccctggacctccagtgggacagataccaaaaaatcagtttcacggatacctagtgaaacatacagttcatccccgtcaggtgcaggctcaacacttcatgacaatgtctttaccagcacagccagagcattttcagaagtccccacaactgccaatggatctacgaaaactaatcacgtccatatcactggtattgtggtcaataagcccaaagatggaatgtcctggccagtgattgtagcagctttactcttttgctgcatgatattgtttggtcttggagtgagaaaatggtgtcagtaccaaaaagaaataatggaaagacctccacctttcaagccaccaccacctcccatcaagtacacttgcattcaagagcccaacgaaagtgatctgccttatcatgagatggagaccctctagtctcgtgagactttgccccatggcagaactctgctggaatcctattgagaaggtagacattgtgctttattaatatagtcgctcttcagccatgcctttgctgcagctgaaatggaagtcagaagtgagtgacctgttttcccagcaactcaccctcttccatctccaaacgcctgaagcttaaccaagagtgagaggatatgtcatgttcacactcaatgcaattcgtagtggttttcttgcttatgtaagaagtacatattagtctgccatctttaaaaaaaaatacagtattttcatttaaattctctgatggagggacaacaatggtttcaactgtatgcccatgcctgatcctcttatttgaacatctatcaacattgtaaactctttgccaaaatcctggggctttgctgcattccctaagataattacaggaaaaagaaaatgtaaaagtgctaacaaggctgccaagtaatggagaagtatggttagtcttcatattgaaattctgttgcttattttcatggaaggaaacagaatactttgcacaggaaccacattttcaatcctccttcactgtcttcctaccatgttcagcccagactcctgccacatggaccaggatgaagagggatcaaagagataattagccaaaaacccagtagcctagaagatacaaaactccactggcctctaaaattatattagccaagagtggtttcatttgagtgccttcgtgtgtatgtccatcaaactggaaccaaactgttttgtaagtaaacaggcagcctaagcccaaccctactttctaattccagttattctctttttcatctggggatttacctgttcatttaatctgcctgttttgatctgttttgaaaaagataaagagcctcaaatcagaccagcactgattaattaaccctgctcctaccaatcttttttaaagcagttgaagcagaatgtataggtgtcagagaagaaacctagtcagccagacgtgctctgtattcagcaatagtttgtgaatgaataaattactaatcctccttgtcgcttgaaaccttcccacactccctgctccaggagggaaaaacagatgttgttgacagatagagtgataggcaaattctgtgtggactttagtcccaaaaggaaactttagttcacttgcagtatgcttatccttgactgcacatgagaatgccttgtgcagagttatttggagattatgtctttttcttaaacaccatggctgtcacacttcagttcaattaaatcagaatgtctgaggagtgagacacaggcatcaacactctcaaatgattcacatgttcagccaaagttgagaaccatcgagcctgtggaagttctttctcatggctcagaatcttaggtaggtgcttaactcttgtggtggccagcctccaagatgagccccagtgttcttgcctcctactattcacatctttatgtggtcccctccaatgctgaatacagatgatttgtgtaacctgaggccaggattaaggggaggcaatcaatgcacctagggaaaaaatttaaggaggtattcacactcagggtcatgcacttgcacaatgttgagaatgagtaccactctcaccattggtatagccaaaaaagcttggaagtgaccaaggctaggtcacaaaatacactgtggcttcttctttgatctctctttgaccatactgacactgggaaaagcccattcccatgccatgaagacaccaaggcagccctattgagaaatctacctgtcgtggccgggcgcagtggctcacgcctgtaatcccagcactttgggaggccgaggtgggtggatcacgaggtcaggagatcgagaccatcctggctaacacagtgaaaccccgtctctactaaaaatacaaaaaattagccgggtgtggtgtcgggcacctgtagtcccagctactcaggaggctgaggcaggagaagggtgggaacccgggaggcagagcttgcagtgagccgagattgtgccactgcacactccaatctgggtgaaagaccgagactccgcctcaaaaaaaaaaaaaaaagaaagaaagaaagaaagaaagaaatctacctgtcaaggaactaaggtattttgctaacaagcaccaacttgccagccatgtaagggagccatcttggaagcagatcctccagcctccagtcaagtcttcagataattgcaacttcagttgatcttttgaccaagacctcaagagagccagaactacccagctaagccttttactaaatttctgaacttctaacactattagataataagtgcttattgtttaacaccattaattttgagtataatttgttacatagcgacagataactatacagctcaacaactagaaaaataaactgtttacctgccttaattatttatctttagttccttattagttctcaagaaacaaatgctagcttcatatgtatggctgttgctttgcttcatgtgtatggctatttgtatttaacaagacttaatcatcagta

SEQ ID NO: 595 - protein, 402 aa, Homo Sapien
MEKKWKYCAVYYIIQIHFVKGVWEKTVNTEENVYATLGSDVNLTCQTQTVGFFVQMQWSKVTNKIDLIAVYHPQYGFYCAYGRPCESLVTFTETPENGSKWTLHLRNMSCSVSGRYECMLVLYPEGIQTKIYNLLIQTHVTADEWNSNHTIEIEINQTLEIPCFQNSSSKISSEFTYAWSVEDNGTQETLISQNHLISNSTLLKDRVKLGTDYRLHLSPVQIFDDGRKFSCHIRVGPNKILRSSTTVKVFAKPEIPVIVENNSTDVLVERRFTCLLKNVFPKANITWFIDGSFLHDEKEGIYITNEERKGKDGFLELKSVLTRVHSNKPAQSDNLTIWCMALSPVPGNKVWNISSEKITFLLGSEISSTDPPLSVTESTLDTQPSPASSVSPASKNVFTLSY

SEQ ID NO: 596 - DNA, 1651 bp, Homo Sapien
ttcctgtctacgtttcatttcctgggggcttgccaagtgataaacagacccaggcgtgtgtggtagagttcgggttttttagcacgaagtgggtggctggagtttgcttgaaaacatcaattgactttgtgatcattacagaaatgctggtgtaaggtgttcagaagacaatggagaaaaaatggaaatactgtgctgtctattacatcatccagatacattttgtcaagggagtttgggaaaaaacagtcaacacagaagaaaatgtttatgctacacttggctctgatgtcaacctgacctgccaaacacagacagtaggcttcttcgtgcagatgcaatggtccaaggtcaccaataagatagacctgattgctgtctatcatccccaatacggcttctactgtgcctatgggagaccctgtgagtcacttgtgactttcacagaaactcctgagaatgggtcaaaatggactctgcacttaaggaatatgtcttgttcagtcagtggaaggtacgagtgtatgcttgttctgtatccagagggcattcagactaaaatctacaaccttctcattcagacacacgttacagcagatgaatggaacagcaaccatacgatagaaatagagataaatcagactctggaaataccatgctttcaaaatagctcctcaaaaatttcatctgagttcacctatgcatggtcggtggaggataatggaactcaggaaacacttatctcccaaaatcacctcatcagcaattccacattacttaaagatagagtcaagcttggtacagactacagactccacctctctccagtccaaatcttcgatgatgggcggaagttctcttgccacattagagtcggtcctaacaaaatcttgaggagctccaccacagtcaaggtttttgctaaaccagaaatccctgtgattgtggaaaataactccacggatgtcttggtagagagaagatttacctgcttactaaagaatgtatttcccaaagcaaatatcacatggtttatagatggaagttttcttcatgatgaaaaagaaggaatatatattactaatgaagagagaaaaggcaaagatggatttttggaactgaagtctgttttaacaagggtacatagtaataaaccagcccaatcagacaacttgaccatttggtgtatggctctgtctccagtcccaggaaataaagtgtggaacatctcatcagaaaagatcacttttctcttaggttctgaaatttcctcaacagaccctccactgagtgttacagaatctacccttgacacccaaccttctccagccagcagtgtatctcctgcaagtaagaatgttttcacactgagctattgatttaaccaagcagattgataacgataaaatttcagcaaacttgcatcattcatgcctgtttcttagctatgacttttttggggctgaaattgggttttattttttaacagctttattgagatataattcacgtcacattaacttgcccatttaaaatgtatgatctaatggtttttagtatgttcacagacttgtacaaccatgactacagccaatttcagaacattttcatcatctaataaagaaactcctaaacaaaaaaaaaaaaaaaa

SEQ ID NO: 597 - protein, 8 aa, Homo Sapien
GFTFDDYG

SEQ ID NO: 598 - protein, 8 aa, Homo Sapien
ISWNSVTI

SEQ ID NO: 599 - protein, 14 aa, Homo Sapien
AKDGGLRYYYGMDV

SEQ ID NO: 600 - protein, 5 aa, Homo Sapien
DYGMY

SEQ ID NO: 601 - protein, 17 aa, Homo Sapien
GISWNSVTIGYADSVKG

SEQ ID NO: 602 - protein, 12 aa, Homo Sapien
DGGLRYYYGMDV

SEQ ID NO: 603 - protein, 121 aa, Homo Sapien
EVQLVESGGGLVQPGRSLRLSCAASGFTFDDYGMYWVRQTPGKGLEWVSGISWNSVTIGYADSVKGRFTISRDNAKNSLYLQMNSLRAEDTALYYCAKDGGLRYYYGMDVWGQGTKVTVSS

SEQ ID NO: 604 - DNA, 363 bp, Homo Sapien
gaagtgcagctggtggagtctgggggaggcttggtacagcctggcaggtccctgagactctcctgtgcagcctctggattcacctttgatgattatggcatgtactgggtccggcaaactccagggaagggcctggagtgggtctcaggtattagttggaatagtgttaccataggctatgcggactctgtgaagggccgattcaccatctccagagacaacgccaagaactccctgtatctgcaaatgaacagtctgagagctgaggacacggccttgtattactgtgcaaaagatggtggcttgaggtattactacggtatggacgtctggggccaagggaccaaggtcaccgtctcctca

SEQ ID NO: 605 - protein, 448 aa, Homo Sapien
EVQLVESGGGLVQPGRSLRLSCAASGFTFDDYGMYWVRQTPGKGLEWVSGISWNSVTIGYADSVKGRFTISRDNAKNSLYLQMNSLRAEDTALYYCAKDGGLRYYYGMDVWGQGTKVTVSSASTKGPSVFPLAPCSRSTSESTAALGCLVKDYFPEPVTVSWNSGALTSGVHTFPAVLQSSGLYSLSSVVTVPSSSLGTKTYTCNVDHKPSNTKVDKRVESKYGPPCPPCPAPEFEGGPSVFLFPPKPKDTLMISRTPEVTCVVVDVSQEDPEVQFNWYVDGVEVHNAKTKPREEQFNSTYRVVSVLTVLHQDWLNGKEYKCKVSNKGLPSSIEKTISKAKGQPREPQVYTLPPSQEEMTKNQVSLTCLVKGFYPSDIAVEWESNGQPENNYKTTPPVLDSDGSFFLYSRLTVDKSRWQEGNVFSCSVMHEALHNHYTQKSLSLSLGK

SEQ ID NO: 606 - DNA, 1344 bp, Homo Sapien
gaagtgcagctggtggagtctgggggaggcttggtacagcctggcaggtccctgagactctcctgtgcagcctctggattcacctttgatgattatggcatgtactgggtccggcaaactccagggaagggcctggagtgggtctcaggtattagttggaatagtgttaccataggctatgcggactctgtgaagggccgattcaccatctccagagacaacgccaagaactccctgtatctgcaaatgaacagtctgagagctgaggacacggccttgtattactgtgcaaaagatggtggcttgaggtattactacggtatggacgtctggggccaagggaccaaggtcaccgtctcctcagccagcaccaagggcccttccgtgttccccctggccccttgcagcaggagcacctccgaatccacagctgccctgggctgtctggtgaaggactactttcccgagcccgtgaccgtgagctggaacagcggcgctctgacatccggcgtccacacctttcctgccgtcctgcagtcctccggcctctactccctgtcctccgtggtgaccgtgcctagctcctccctcggcaccaagacctacacctgtaacgtggaccacaaaccctccaacaccaaggtggacaaacgggtcgagagcaagtacggccctccctgccctccttgtcctgcccccgagttcgaaggcggacccagcgtgttcctgttccctcctaagcccaaggacaccctcatgatcagccggacacccgaggtgacctgcgtggtggtggatgtgagccaggaggaccctgaggtccagttcaactggtatgtggatggcgtggaggtgcacaacgccaagacaaagccccgggaagagcagttcaactccacctacagggtggtcagcgtgctgaccgtgctgcatcaggactggctgaacggcaaggagtacaagtgcaaggtcagcaataagggactgcccagcagcatcgagaagaccatctccaaggctaaaggccagccccgggaacctcaggtgtacaccctgcctcccagccaggaggagatgaccaagaaccaggtgagcctgacctgcctggtgaagggattctacccttccgacatcgccgtggagtgggagtccaacggccagcccgagaacaattataagaccacccctcccgtcctcgacagcgacggatccttctttctgtactccaggctgaccgtggataagtccaggtggcaggaaggcaacgtgttcagctgctccgtgatgcacgaggccctgcacaatcactacacccagaagtccctgagcctgtccctgggaaag

SEQ ID NO: 607 - protein, 11 aa, Homo Sapien
QSLLHSNGYNY

SEQ ID NO: 608 - protein, 3 aa, Homo Sapien
LDS

SEQ ID NO: 609 - protein, 9 aa, Homo Sapien
MQALRTPLT

SEQ ID NO: 610 - protein, 16 aa, Homo Sapien
RSSQSLLHSNGYNYLA

SEQ ID NO: 611 - protein, 7 aa, Homo Sapien
LDSNRAS

SEQ ID NO: 612 - protein, 9 aa, Homo Sapien
MQALRTPLT

SEQ ID NO: 613 - protein, 112 aa, Homo Sapien
DIVMTQSPLSLSVTPGESASISCRSSQSLLHSNGYNYLAWYLQKPGQSPQLLIYLDSNRASGVPDRFSGSGSGTDFTLKISRVEAEDVGIYYCMQALRTPLTFGGGTKVEIK

SEQ ID NO: 614 - DNA, 336 bp, Homo Sapien
gatattgtgatgactcagtctccactctccctgtccgtcacccctggagagtcggcctccatctcctgcaggtctagtcagagcctcctgcatagtaatggatacaactatttggcttggtacctgcagaagccagggcagtctccacagctcctgatctatttggattctaatcgggcctccggggtccctgacaggttcagtggcagtggatcaggcacagattttacactgaaaatcagcagagtggaggctgaggatgttgggatttattactgcatgcaagctctgcgaactccgctcactttcggcggagggaccaaggtggagatcaaa

SEQ ID NO: 615 - protein, 219 aa, Homo Sapien
DIVMTQSPLSLSVTPGESASISCRSSQSLLHSNGYNYLAWYLQKPGQSPQLLIYLDSNRASGVPDRFSGSGSGTDFTLKISRVEAEDVGIYYCMQALRTPLTFGGGTKVEIKRTVAAPSVFIFPPSDEQLKSGTASVVCLLNNFYPREAKVQWKVDNALQSGNSQESVTEQDSKDSTYSLSSTLTLSKADYEKHKVYACEVTHQGLSSPVTKSFNRGEC

SEQ ID NO: 616 - DNA, 657 bp, Homo Sapien
gatattgtgatgactcagtctccactctccctgtccgtcacccctggagagtcggcctccatctcctgcaggtctagtcagagcctcctgcatagtaatggatacaactatttggcttggtacctgcagaagccagggcagtctccacagctcctgatctatttggattctaatcgggcctccggggtccctgacaggttcagtggcagtggatcaggcacagattttacactgaaaatcagcagagtggaggctgaggatgttgggatttattactgcatgcaagctctgcgaactccgctcactttcggcggagggaccaaggtggagatcaaacgtacggtggccgctccctccgtgttcatcttcccaccttccgacgagcagctgaagtccggcaccgcttctgtcgtgtgcctgctgaacaacttctacccccgcgaggccaaggtgcagtggaaggtggacaacgccctgcagtccggcaactcccaggaatccgtgaccgagcaggactccaaggacagcacctactccctgtcctccaccctgaccctgtccaaggccgactacgagaagcacaaggtgtacgcctgcgaagtgacccaccagggcctgtctagccccgtgaccaagtctttcaaccggggcgagtgt

SEQ ID NO: 617 - protein, 8 aa, Homo Sapien
GFTFSDYY

SEQ ID NO: 618 - protein, 8 aa, Homo Sapien
ISSSGSTV

SEQ ID NO: 619 - protein, 14 aa, Homo Sapien
ARDRGFGESYCFDY

SEQ ID NO: 620 - protein, 5 aa, Homo Sapien
DYYMS

SEQ ID NO: 621 - protein, 17 aa, Homo Sapien
YISSSGSTVYSADSVKG

SEQ ID NO: 622 - protein, 12 aa, Homo Sapien
DRGFGESYCFDY

SEQ ID NO: 623 - protein, 121 aa, Homo Sapien
QVPLVESGGGLVRPGGSLRLSCAASGFTFSDYYMSWIRQAPGKGLEWVSYISSSGSTVYSADSVKGRFTVSRDNAKSSLLLHMNSLRAEDTAIYYCARDRGFGESYCFDYWGQGTLVTVSS

SEQ ID NO: 624 - DNA, 363 bp, Homo Sapien
caggtgccgctggtggagtctgggggaggcttggtcaggcctggagggtccctgagactctcctgtgcagcctctggattcaccttcagtgactactacatgagctggatccgccaggctccagggaaggggctggagtgggtttcatacattagtagtagtggtagtaccgtgtattccgcagactctgtgaagggccgattcaccgtctccagggacaacgccaagagctcactgcttctgcacatgaacagcctgagagccgaggacacggccatatattactgtgcgagagatagagggttcggggagtcctattgctttgactactggggccagggaaccctggtcaccgtctcctca

SEQ ID NO: 625 - protein, 448 aa, Homo Sapien
QVPLVESGGGLVRPGGSLRLSCAASGFTFSDYYMSWIRQAPGKGLEWVSYISSSGSTVYSADSVKGRFTVSRDNAKSSLLLHMNSLRAEDTAIYYCARDRGFGESYCFDYWGQGTLVTVSSASTKGPSVFPLAPCSRSTSESTAALGCLVKDYFPEPVTVSWNSGALTSGVHTFPAVLQSSGLYSLSSVVTVPSSSLGTKTYTCNVDHKPSNTKVDKRVESKYGPPCPPCPAPEFEGGPSVFLFPPKPKDTLMISRTPEVTCVVVDVSQEDPEVQFNWYVDGVEVHNAKTKPREEQFNSTYRVVSVLTVLHQDWLNGKEYKCKVSNKGLPSSIEKTISKAKGQPREPQVYTLPPSQEEMTKNQVSLTCLVKGFYPSDIAVEWESNGQPENNYKTTPPVLDSDGSFFLYSRLTVDKSRWQEGNVFSCSVMHEALHNHYTQKSLSLSLGK

SEQ ID NO: 626 - DNA, 1344 bp, Homo Sapien
caggtgccgctggtggagtctgggggaggcttggtcaggcctggagggtccctgagactctcctgtgcagcctctggattcaccttcagtgactactacatgagctggatccgccaggctccagggaaggggctggagtgggtttcatacattagtagtagtggtagtaccgtgtattccgcagactctgtgaagggccgattcaccgtctccagggacaacgccaagagctcactgcttctgcacatgaacagcctgagagccgaggacacggccatatattactgtgcgagagatagagggttcggggagtcctattgctttgactactggggccagggaaccctggtcaccgtctcctcagccagcaccaagggcccttccgtgttccccctggccccttgcagcaggagcacctccgaatccacagctgccctgggctgtctggtgaaggactactttcccgagcccgtgaccgtgagctggaacagcggcgctctgacatccggcgtccacacctttcctgccgtcctgcagtcctccggcctctactccctgtcctccgtggtgaccgtgcctagctcctccctcggcaccaagacctacacctgtaacgtggaccacaaaccctccaacaccaaggtggacaaacgggtcgagagcaagtacggccctccctgccctccttgtcctgcccccgagttcgaaggcggacccagcgtgttcctgttccctcctaagcccaaggacaccctcatgatcagccggacacccgaggtgacctgcgtggtggtggatgtgagccaggaggaccctgaggtccagttcaactggtatgtggatggcgtggaggtgcacaacgccaagacaaagccccgggaagagcagttcaactccacctacagggtggtcagcgtgctgaccgtgctgcatcaggactggctgaacggcaaggagtacaagtgcaaggtcagcaataagggactgcccagcagcatcgagaagaccatctccaaggctaaaggccagccccgggaacctcaggtgtacaccctgcctcccagccaggaggagatgaccaagaaccaggtgagcctgacctgcctggtgaagggattctacccttccgacatcgccgtggagtgggagtccaacggccagcccgagaacaattataagaccacccctcccgtcctcgacagcgacggatccttctttctgtactccaggctgaccgtggataagtccaggtggcaggaaggcaacgtgttcagctgctccgtgatgcacgaggccctgcacaatcactacacccagaagtccctgagcctgtccctgggaaag

SEQ ID NO: 627 - protein, 6 aa, Homo Sapien
QNIRSY

SEQ ID NO: 628 - protein, 3 aa, Homo Sapien
TAS

SEQ ID NO: 629 - protein, 9 aa, Homo Sapien
QQSYSIPCS

SEQ ID NO: 630 - protein, 11 aa, Homo Sapien
RASQNIRSYLT

SEQ ID NO: 631 - protein, 7 aa, Homo Sapien
TASSLQS

SEQ ID NO: 632 - protein, 9 aa, Homo Sapien
QQSYSIPCS

SEQ ID NO: 633 - protein, 107 aa, Homo Sapien
DIQMTQSPSSLSASVGDRVTITCRASQNIRSYLTWYQQKPGKAPKLLIYTASSLQSGVPSRFSGSGSGTDFTLTISSLQPEDFATYYCQQSYSIPCSFGQGTKLEIK

SEQ ID NO: 634 - DNA, 321 bp, Homo Sapien
gacatccagatgacccagtctccatcctccctgtctgcatctgtaggagacagagtcaccatcacttgccgggcaagtcagaacattaggagttatttaacttggtatcagcagaaaccagggaaagcccctaagctcctgatctatactgcatccagtttacaaagtggggtcccatcaaggttcagtggcagtggatctgggacagatttcactctcaccatcagcagtctgcaacctgaagattttgcaacttattactgtcaacagagttacagtatcccgtgcagttttggccaggggaccaagctggagatcaaa

SEQ ID NO: 635 - protein, 214 aa, Homo Sapien
DIQMTQSPSSLSASVGDRVTITCRASQNIRSYLTWYQQKPGKAPKLLIYTASSLQSGVPSRFSGSGSGTDFTLTISSLQPEDFATYYCQQSYSIPCSFGQGTKLEIKRTVAAPSVFIFPPSDEQLKSGTASVVCLLNNFYPREAKVQWKVDNALQSGNSQESVTEQDSKDSTYSLSSTLTLSKADYEKHKVYACEVTHQGLSSPVTKSFNRGEC

SEQ ID NO: 636 - DNA, 642 bp, Homo Sapien
gacatccagatgacccagtctccatcctccctgtctgcatctgtaggagacagagtcaccatcacttgccgggcaagtcagaacattaggagttatttaacttggtatcagcagaaaccagggaaagcccctaagctcctgatctatactgcatccagtttacaaagtggggtcccatcaaggttcagtggcagtggatctgggacagatttcactctcaccatcagcagtctgcaacctgaagattttgcaacttattactgtcaacagagttacagtatcccgtgcagttttggccaggggaccaagctggagatcaaacgtacggtggccgctccctccgtgttcatcttcccaccttccgacgagcagctgaagtccggcaccgcttctgtcgtgtgcctgctgaacaacttctacccccgcgaggccaaggtgcagtggaaggtggacaacgccctgcagtccggcaactcccaggaatccgtgaccgagcaggactccaaggacagcacctactccctgtcctccaccctgaccctgtccaaggccgactacgagaagcacaaggtgtacgcctgcgaagtgacccaccagggcctgtctagccccgtgaccaagtctttcaaccggggcgagtgt

SEQ ID NO: 637 - protein, 8 aa, Homo Sapien
GFTFSNAW

SEQ ID NO: 638 - protein, 10 aa, Homo Sapien
IKSKANGGTT

SEQ ID NO: 639 - protein, 12 aa, Homo Sapien
VIDPLYDILTGY

SEQ ID NO: 640 - protein, 5 aa, Homo Sapien
NAWMS

SEQ ID NO: 641 - protein, 19 aa, Homo Sapien
RIKSKANGGTTDYAAPVKG

SEQ ID NO: 642 - protein, 10 aa, Homo Sapien
DPLYDILTGY

SEQ ID NO: 643 - protein, 121 aa, Homo Sapien
EVQLVESGGDLVKPGGSLRLSCAASGFTFSNAWMSWVRQAPGKGLEWVGRIKSKANGGTTDYAAPVKGSFTISRDDSKNTLYLQMSSLKTEDTAVYYCVIDPLYDILTGYWGRGTLVTVSS

SEQ ID NO: 644 - DNA, 363 bp, Homo Sapien
gaggtgcagctggtggagtctgggggagacttggtcaagcctggggggtcccttagactctcctgtgcagcctctggattcactttcagtaacgcctggatgagctgggtccgccaggctccagggaaggggctggagtgggttggccgtattaaaagcaaagctaatggtggaacaacagactacgctgcacccgtgaaaggcagtttcaccatctcaagagatgattcaaaaaacacgctgtatctgcaaatgagcagcctgaaaaccgaggacacagccgtgtattattgtgttatagaccccctttacgatattttgactggatactggggccggggaaccctggtcaccgtctcctca

SEQ ID NO: 645 - protein, 448 aa, Homo Sapien
EVQLVESGGDLVKPGGSLRLSCAASGFTFSNAWMSWVRQAPGKGLEWVGRIKSKANGGTTDYAAPVKGSFTISRDDSKNTLYLQMSSLKTEDTAVYYCVIDPLYDILTGYWGRGTLVTVSSASTKGPSVFPLAPCSRSTSESTAALGCLVKDYFPEPVTVSWNSGALTSGVHTFPAVLQSSGLYSLSSVVTVPSSSLGTKTYTCNVDHKPSNTKVDKRVESKYGPPCPPCPAPEFEGGPSVFLFPPKPKDTLMISRTPEVTCVVVDVSQEDPEVQFNWYVDGVEVHNAKTKPREEQFNSTYRVVSVLTVLHQDWLNGKEYKCKVSNKGLPSSIEKTISKAKGQPREPQVYTLPPSQEEMTKNQVSLTCLVKGFYPSDIAVEWESNGQPENNYKTTPPVLDSDGSFFLYSRLTVDKSRWQEGNVFSCSVMHEALHNHYTQKSLSLSLGK

SEQ ID NO: 646 - DNA, 1344 bp, Homo Sapien
gaggtgcagctggtggagtctgggggagacttggtcaagcctggggggtcccttagactctcctgtgcagcctctggattcactttcagtaacgcctggatgagctgggtccgccaggctccagggaaggggctggagtgggttggccgtattaaaagcaaagctaatggtggaacaacagactacgctgcacccgtgaaaggcagtttcaccatctcaagagatgattcaaaaaacacgctgtatctgcaaatgagcagcctgaaaaccgaggacacagccgtgtattattgtgttatagaccccctttacgatattttgactggatactggggccggggaaccctggtcaccgtctcctcagccagcaccaagggcccttccgtgttccccctggccccttgcagcaggagcacctccgaatccacagctgccctgggctgtctggtgaaggactactttcccgagcccgtgaccgtgagctggaacagcggcgctctgacatccggcgtccacacctttcctgccgtcctgcagtcctccggcctctactccctgtcctccgtggtgaccgtgcctagctcctccctcggcaccaagacctacacctgtaacgtggaccacaaaccctccaacaccaaggtggacaaacgggtcgagagcaagtacggccctccctgccctccttgtcctgcccccgagttcgaaggcggacccagcgtgttcctgttccctcctaagcccaaggacaccctcatgatcagccggacacccgaggtgacctgcgtggtggtggatgtgagccaggaggaccctgaggtccagttcaactggtatgtggatggcgtggaggtgcacaacgccaagacaaagccccgggaagagcagttcaactccacctacagggtggtcagcgtgctgaccgtgctgcatcaggactggctgaacggcaaggagtacaagtgcaaggtcagcaataagggactgcccagcagcatcgagaagaccatctccaaggctaaaggccagccccgggaacctcaggtgtacaccctgcctcccagccaggaggagatgaccaagaaccaggtgagcctgacctgcctggtgaagggattctacccttccgacatcgccgtggagtgggagtccaacggccagcccgagaacaattataagaccacccctcccgtcctcgacagcgacggatccttctttctgtactccaggctgaccgtggataagtccaggtggcaggaaggcaacgtgttcagctgctccgtgatgcacgaggccctgcacaatcactacacccagaagtccctgagcctgtccctgggaaag

SEQ ID NO: 647 - protein, 6 aa, Homo Sapien
KLGDKY

SEQ ID NO: 648 - protein, 3 aa, Homo Sapien
QDS

SEQ ID NO: 649 - protein, 9 aa, Homo Sapien
QAWDSSTAV

SEQ ID NO: 650 - protein, 11 aa, Homo Sapien
SGDKLGDKYAC

SEQ ID NO: 651 - protein, 7 aa, Homo Sapien
QDSKRPS

SEQ ID NO: 652 - protein, 9 aa, Homo Sapien
QAWDSSTAV

SEQ ID NO: 653 - protein, 106 aa, Homo Sapien
SYDLTQPPSVSVSPGQTASITCSGDKLGDKYACWYQQKPGQSPVLVIYQDSKRPSGIPERFSGSNSGNTATLTISGTQAMDEADYYCQAWDSSTAVFGGGTKLTVL

SEQ ID NO: 654 - DNA, 318 bp, Homo Sapien
tcctatgacctgactcagccaccctcagtgtccgtgtccccaggacagacagccagcatcacctgctctggagataaattgggggataaatatgcttgttggtatcagcagaagccaggccagtcccctgtgctggtcatctatcaagatagtaagcggccctcagggatccctgagcgattctctggctccaattctgggaacacagccactctgaccatcagcgggacccaggctatggatgaggctgactattactgtcaggcgtgggacagcagcactgcggttttcggcggagggaccaagctgaccgtccta

SEQ ID NO: 655 - protein, 212 aa, Homo Sapien
SYDLTQPPSVSVSPGQTASITCSGDKLGDKYACWYQQKPGQSPVLVIYQDSKRPSGIPERFSGSNSGNTATLTISGTQAMDEADYYCQAWDSSTAVFGGGTKLTVLGQPKAAPSVTLFPPSSEELQANKATLVCLISDFYPGAVTVAWKADSSPVKAGVETTTPSKQSNNKYAASSYLSLTPEQWKSHRSYSCQVTHEGSTVEKTVAPTECS

SEQ ID NO: 656 - DNA, 636 bp, Homo Sapien
tcctatgacctgactcagccaccctcagtgtccgtgtccccaggacagacagccagcatcacctgctctggagataaattgggggataaatatgcttgttggtatcagcagaagccaggccagtcccctgtgctggtcatctatcaagatagtaagcggccctcagggatccctgagcgattctctggctccaattctgggaacacagccactctgaccatcagcgggacccaggctatggatgaggctgactattactgtcaggcgtgggacagcagcactgcggttttcggcggagggaccaagctgaccgtcctaggtcagcccaaggctgccccctcggtcactctgttcccgccctcctctgaggagcttcaagccaacaaggccacactggtgtgtctcataagtgacttctacccgggagccgtgacagtggcctggaaggcagatagcagccccgtcaaggcgggagtggagaccaccacaccctccaaacaaagcaacaacaagtacgcggccagcagctatctgagcctgacgcctgagcagtggaagtcccacagaagctacagctgccaggtcacgcatgaagggagcaccgtggagaagacagtggcccctacagaatgttca

SEQ ID NO: 657 - protein, 9 aa, Homo Sapien
GDSISSSNW

SEQ ID NO: 658 - protein, 7 aa, Homo Sapien
IYHSGNT

SEQ ID NO: 659 - protein, 19 aa, Homo Sapien
ARARVYDILTGRGYYGMDV

SEQ ID NO: 660 - protein, 6 aa, Homo Sapien
SSNWWS

SEQ ID NO: 661 - protein, 16 aa, Homo Sapien
EIYHSGNTNYNPSLKS

SEQ ID NO: 662 - protein, 17 aa, Homo Sapien
ARVYDILTGRGYYGMDV

SEQ ID NO: 663 - protein, 126 aa, Homo Sapien
QVQLQESGPGLVRPSGTLSLTCAVSGDSISSSNWWSWVRQPPGKGLEWIGEIYHSGNTNYNPSLKSRGTISVDKSKNQFSLKLTSITAADTAVYYCARARVYDILTGRGYYGMDVWGQGTTVTVSS

SEQ ID NO: 664 - DNA, 378 bp, Homo Sapien
caggtgcagctgcaggagtcgggcccaggactggtgaggccttcggggaccctgtccctcacctgcgctgtctctggtgactccatcagcagtagtaactggtggagttgggtccgccagcccccagggaaggggctggagtggattggggaaatctatcatagtgggaacaccaactacaatccgtccctcaagagtcgaggcaccatttcagtagacaagtccaagaaccagttctccctgaagctgacctctataaccgccgcggacacggccgtatattactgtgcgagagcgagggtttacgatattttgactggtcgaggttactacggtatggacgtctggggccaagggaccacggtcaccgtctcctca

SEQ ID NO: 665 - protein, 453 aa, Homo Sapien
QVQLQESGPGLVRPSGTLSLTCAVSGDSISSSNWWSWVRQPPGKGLEWIGEIYHSGNTNYNPSLKSRGTISVDKSKNQFSLKLTSITAADTAVYYCARARVYDILTGRGYYGMDVWGQGTTVTVSSASTKGPSVFPLAPCSRSTSESTAALGCLVKDYFPEPVTVSWNSGALTSGVHTFPAVLQSSGLYSLSSVVTVPSSSLGTKTYTCNVDHKPSNTKVDKRVESKYGPPCPPCPAPEFEGGPSVFLFPPKPKDTLMISRTPEVTCVVVDVSQEDPEVQFNWYVDGVEVHNAKTKPREEQFNSTYRVVSVLTVLHQDWLNGKEYKCKVSNKGLPSSIEKTISKAKGQPREPQVYTLPPSQEEMTKNQVSLTCLVKGFYPSDIAVEWESNGQPENNYKTTPPVLDSDGSFFLYSRLTVDKSRWQEGNVFSCSVMHEALHNHYTQKSLSLSLGK

SEQ ID NO: 666 - DNA, 1359 bp, Homo Sapien
caggtgcagctgcaggagtcgggcccaggactggtgaggccttcggggaccctgtccctcacctgcgctgtctctggtgactccatcagcagtagtaactggtggagttgggtccgccagcccccagggaaggggctggagtggattggggaaatctatcatagtgggaacaccaactacaatccgtccctcaagagtcgaggcaccatttcagtagacaagtccaagaaccagttctccctgaagctgacctctataaccgccgcggacacggccgtatattactgtgcgagagcgagggtttacgatattttgactggtcgaggttactacggtatggacgtctggggccaagggaccacggtcaccgtctcctcagccagcaccaagggcccttccgtgttccccctggccccttgcagcaggagcacctccgaatccacagctgccctgggctgtctggtgaaggactactttcccgagcccgtgaccgtgagctggaacagcggcgctctgacatccggcgtccacacctttcctgccgtcctgcagtcctccggcctctactccctgtcctccgtggtgaccgtgcctagctcctccctcggcaccaagacctacacctgtaacgtggaccacaaaccctccaacaccaaggtggacaaacgggtcgagagcaagtacggccctccctgccctccttgtcctgcccccgagttcgaaggcggacccagcgtgttcctgttccctcctaagcccaaggacaccctcatgatcagccggacacccgaggtgacctgcgtggtggtggatgtgagccaggaggaccctgaggtccagttcaactggtatgtggatggcgtggaggtgcacaacgccaagacaaagccccgggaagagcagttcaactccacctacagggtggtcagcgtgctgaccgtgctgcatcaggactggctgaacggcaaggagtacaagtgcaaggtcagcaataagggactgcccagcagcatcgagaagaccatctccaaggctaaaggccagccccgggaacctcaggtgtacaccctgcctcccagccaggaggagatgaccaagaaccaggtgagcctgacctgcctggtgaagggattctacccttccgacatcgccgtggagtgggagtccaacggccagcccgagaacaattataagaccacccctcccgtcctcgacagcgacggatccttctttctgtactccaggctgaccgtggataagtccaggtggcaggaaggcaacgtgttcagctgctccgtgatgcacgaggccctgcacaatcactacacccagaagtccctgagcctgtccctgggaaag

SEQ ID NO: 667 - protein, 6 aa, Homo Sapien
ALPKKY

SEQ ID NO: 668 - protein, 3 aa, Homo Sapien
EDR

SEQ ID NO: 669 - protein, 11 aa, Homo Sapien
FSTDSSGNPRV

SEQ ID NO: 670 - protein, 11 aa, Homo Sapien
SGDALPKKYAY

SEQ ID NO: 671 - protein, 7 aa, Homo Sapien
EDRKRPS

SEQ ID NO: 672 - protein, 11 aa, Homo Sapien
FSTDSSGNPRV

SEQ ID NO: 673 - protein, 108 aa, Homo Sapien
SYELTQPPSVSVSPGQTARITCSGDALPKKYAYWYQQKSGQAPVLVIHEDRKRPSGIPERFSGSSSGTMATLTISGAQVEDEADYYCFSTDSSGNPRVFGGGTKLTVL

SEQ ID NO: 674 - DNA, 324 bp, Homo Sapien
tcctatgagctgacacagccaccctcggtgtcagtgtccccaggacaaacggccaggatcacctgctctggagatgcattgccaaaaaagtatgcttattggtaccagcagaagtcaggccaggcccctgttctggtcatccatgaggacaggaaacgaccctccgggatccctgagagattctctggctccagctcagggacaatggccaccttgactatcagtggggcccaggtggaggatgaagctgactactactgtttctcaacagacagcagtggtaatcctagggtgttcggcggagggaccaagctgaccgtccta

SEQ ID NO: 675 - protein, 214 aa, Homo Sapien
SYELTQPPSVSVSPGQTARITCSGDALPKKYAYWYQQKSGQAPVLVIHEDRKRPSGIPERFSGSSSGTMATLTISGAQVEDEADYYCFSTDSSGNPRVFGGGTKLTVLGQPKAAPSVTLFPPSSEELQANKATLVCLISDFYPGAVTVAWKADSSPVKAGVETTTPSKQSNNKYAASSYLSLTPEQWKSHKSYSCQVTHEGSTVEKTVAPTECS

SEQ ID NO: 676 - DNA, 651 bp, Homo Sapien
tctgaggcctcctatgagctgacacagccaccctcggtgtcagtgtccccaggacaaacggccaggatcacctgctctggagatgcattgccaaaaaagtatgcttattggtaccagcagaagtcaggccaggcccctgttctggtcatccatgaggacaggaaacgaccctccgggatccctgagagattctctggctccagctcagggacaatggccaccttgactatcagtggggcccaggtggaggatgaagctgactactactgtttctcaacagacagcagtggtaatcctagggtgttcggcggagggaccaagctgaccgtcctaggtcagcccaaggctgccccctcggtcactctgttcccaccctcctctgaggagcttcaagccaacaaggccacactggtgtgtctcataagtgacttctacccgggagccgtgacagtggcctggaaggcagatagcagccccgtcaaggcgggagtggagaccaccacaccctccaaacaaagcaacaacaagtacgcggccagcagctacctgagcctgacgcctgagcagtggaagtcccacaaaagctacagctgccaggtcacgcatgaagggagcaccgtggagaagacagtggcccctacagaatgttca

SEQ ID NO: 677 - protein, 123 aa, Homo Sapien
EVQLVESGGGLVQPGRSLRLSCAASGFTFDDYAMHWVRLGPGRGLEWVSRISWNSGSTDYADSVKGRFTISRDNAKNSLFLQMNSLRTEDTALYYCAKERTPAGITVAGFDYWGQGSLVTVSS

SEQ ID NO: 678 - DNA, 369 bp, Homo Sapien
gaagtgcaactggtggagtctgggggaggcttggtacagcctggcaggtccctgagactctcctgtgcagcctctggattcacctttgatgattatgccatgcactgggtccggctaggtccagggaggggcctggagtgggtctcacgtattagttggaatagtggttccacagactatgcggactctgtgaagggccgattcaccatctccagagacaacgccaagaactccctctttctgcaaatgaacagtctgagaactgaggacacggccttgtattactgtgcaaaagaaagaacccccgcgggtataacagtggctggttttgactactggggccagggatccctggtcaccgtctcctca

SEQ ID NO: 679 - protein, 112 aa, Homo Sapien
DIVMTQSPLSLPVTPGEPASISCRSSQSLLHSNGFNYLDWYLQKPGQTPQLLIYLVSTRASGVPDRFSGSGSGTDFTLKISRVEAEDVGVFYCMQALQTPCSFGQGTKLEIK

SEQ ID NO: 680 - DNA, 336 bp, Homo Sapien
gatattgtgatgactcagtctccactctccctgcccgtcacccctggagagccggcctccatctcctgcaggtctagtcagagcctcctgcatagtaatggattcaactatttggattggtacctgcagaagccagggcagactccacaactcctgatctatttggtttctactcgggcctccggggtccctgacaggttcagtggcagtggatcaggcacagattttacactgaaaatcagcagagtggaggctgaggatgttggggttttttactgcatgcaagctctacaaactccgtgcagttttggccaggggaccaagctggagatcaaa

SEQ ID NO: 681 - protein, 123 aa, Homo Sapien
EVQLVESGGGLVQPGRSLRLSCAASGFTFDAYALHWVRLGPGRGLEWVSRISWNSGSIDYADSVKGRFTISRDNAKNSLYLQMNSLRTEDTALYYCAKERTPAGITVAGFDFWGQGTLVTVSS

SEQ ID NO: 682 - DNA, 369 bp, Homo Sapien
gaagtgcaactggtggagtctgggggaggcttggtacagcctggcaggtccctgagactctcctgtgcagcctctggattcacctttgatgcttatgccttgcactgggtccggctaggtccagggaggggcctggagtgggtctcacgtattagttggaatagtggttctattgactatgcggactctgtgaagggccgattcaccatctccagagacaacgccaagaactccctgtatctgcaaatgaacagtctgagaactgaggacacggccttgtattactgtgcaaaagaaagaacccccgcgggtataacagtggctggttttgacttctggggccaggggaccctggtcaccgtctcctca

SEQ ID NO: 683 - protein, 112 aa, Homo Sapien; identical to SEQ ID NO: 679

SEQ ID NO: 684 - DNA, 336 bp, Homo Sapien
gatattgtgatgactcagtctccactctccctgcccgtcacccctggagagccggcctccatctcctgcaggtctagtcagagcctcctgcatagtaatggattcaactatttggattggtacctgcagaagccaggacagactccacaactcctgatctatttggtttctactcgggcctccggggtccctgacaggttcagtggcagtggatcaggcacagattttacactgaaaatcagcagagtggaggctgaggatgttggggttttttactgcatgcaagctctacagactccgtgcagttttggccaggggaccaagctggagatcaaa

SEQ ID NO: 685 - protein, 123 aa, Homo Sapien
EVQLVESGGDLVQPGRSLRLSCAASGFTFDDYAMHWVRLGPGRGLEWVSRISWNSGSIDYADSVKGRFTISRDNAKNSLYLQMNSLRTEDTALYYCAKERTPAGITVAGFDYWGQGTLVTVSS

SEQ ID NO: 686 - DNA, 369 bp, Homo Sapien
gaagtgcagctggtggagtctgggggagacttggtacagcctggcaggtccctgagactctcctgtgcagcctctggattcacctttgatgattatgccatgcactgggtccggctaggtccagggaggggcctggagtgggtctcacgtattagttggaatagtggttctatagactatgcggactctgtgaagggccgattcaccatctccagagacaacgccaagaactccctgtatctgcaaatgaacagtctgagaactgaggacacggccttgtattactgtgcaaaagaaagaacccccgcgggtataacagtggctggttttgactactggggccagggaaccctggtcaccgtctcctca

SEQ ID NO: 687 - protein, 112 aa, Homo Sapien; identical to SEQ ID NO: 679

SEQ ID NO: 688 - DNA, 336 bp, Homo Sapien; identical to SEQ ID NO: 680

SEQ ID NO: 689 - protein, 123 aa, Homo Sapien
EVQLVESGGGLVQPGRSLRLSCAASGFTFDDYAMHWVRLGPGRGLEWVSRISWNSGSIDYADSVKGRFTISRDNAKNSLYLQMNSLRTEDTALYYCAKERTPAGITVAGFDYWGQGTLVTVSS

SEQ ID NO: 690 - DNA, 369 bp, Homo Sapien
gaagtgcagctggtggagtctgggggaggcttggtacagcctggcaggtccctgagactctcctgtgcagcctctggattcacgtttgatgattatgccatgcactgggtccggctaggtccagggaggggcctggagtgggtctcacgtattagttggaatagtggttctatagactatgcggactctgtgaagggccgattcaccatctccagagacaacgccaagaactccctgtatctgcaaatgaacagtctgagaactgaggacacggccctgtattactgtgcaaaagaaagaacccccgcgggtataacagtggctggttttgactactggggccagggaaccctggtcaccgtctcctca

SEQ ID NO: 691 - protein, 112 aa, Homo Sapien; identical to SEQ ID NO: 679

SEQ ID NO: 692 - DNA, 336 bp, Homo Sapien; identical to SEQ ID NO: 680

SEQ ID NO: 693 - protein, 121 aa, Homo Sapien
EVQLVESGGGLVKPGGSLRLSCAASGFTFSNAWMSWVRQAPGKGLEWVGRIKSKTNGGTTDYAAPVKGRFTISRDDSKNTLYLQMNSLKTEDTAVYCCTIDPLYDILTGPWGQGTLVTVSS

SEQ ID NO: 694 - DNA, 363 bp, Homo Sapien
gaggtgcagctggtggagtctgggggaggcttggtaaagcctggggggtcccttagactctcctgtgcagcctctggattcacttttagtaacgcctggatgagctgggtccgccaggctccagggaagggactggagtgggttggccgtattaaaagcaaaactaatggtgggacaacagactacgctgcacccgtgaaaggcagattcaccatctcaagagatgattcaaaaaacacgctgtatctgcaaatgaacagcctgaaaaccgaggacacagccgtttattgttgtaccatagaccccctctatgatattttgactggtccctggggccagggaaccctggtcaccgtctcctca

SEQ ID NO: 695 - protein, 106 aa, Homo Sapien
PYELTQAPSVSVSPGQAASITCSGDKLGDKYACWYQQKPGQSPVLVIYQDSKRPSGIPERFSGSNSGNTATLTISGTQAMDEADYYCQAWDSSTVVFGGGTKLTVL

SEQ ID NO: 696 - DNA, 318 bp, Homo Sapien
ccctatgaactgactcaggcaccctcagtgtccgtgtccccaggacaggcagccagcatcacctgctctggagataaattgggggataaatatgcttgctggtatcagcagaagccaggccagtcccctgtgctggtcatctatcaagatagcaagcggccctcagggatccctgagcgattctctggctccaattctgggaacacagccactctgaccatcagcgggacccaggctatggatgaggctgactattactgtcaggcgtgggacagcagcactgtggttttcggcggagggaccaagctgaccgtccta

SEQ ID NO: 697 - protein, 121 aa, Homo Sapien
EVQLVESGGGLVKPGGSLRLSCAASGFTFSYAWMSWVRQAPGKGLEWVGRIKSKTNGGTTDYAAPVKGRFTISRDDSKDTLYLLMNSLKTEDTAVYYCTIDPLYDLLTGPWGQGTLVTVSS

SEQ ID NO: 698 - DNA, 363 bp, Homo Sapien
gaggtgcagctggtggagtctgggggaggcttggtaaagcctggggggtcccttagactctcctgtgcagcctctggattcacttttagttacgcctggatgagctgggtccgccaggctccagggaaggggctggagtgggttggccgtattaaaagcaaaactaatggtgggacaacagactacgctgcacccgtgaaaggcagattcaccatctcaagagatgattcaaaagacacgctgtatctgctaatgaacagcctgaaaaccgaggacacagccgtgtattactgtaccatagaccccctctacgatcttttgactggtccctggggccagggaaccctggtcaccgtctcctca

SEQ ID NO: 699 - protein, 106 aa, Homo Sapien
SYELTQPPSVSVSPGQTASITCSGDKLGDKYGCWYQQKPGQSPILVIYQDSKRPSGIPERFSGSNSGNTATLTISGTQAMDEADYYCQAWDSSTVVFGGGTKLTVL

SEQ ID NO: 700 - DNA, 318 bp, Homo Sapien
tcctatgagctgactcagccaccctcagtgtccgtgtccccaggacagacagccagcatcacctgctctggagataaattgggggataaatatggttgctggtatcagcagaagccaggccagtcccctatactggtcatctatcaagatagcaagcggccctcggggatccctgagcgattctctggctccaattctgggaacacagccactctgaccatcagcgggacccaggctatggatgaggctgactattactgtcaggcgtgggacagcagcactgtggtattcggcggagggaccaagctgaccgtccta

SEQ ID NO: 701 - protein, 121 aa, Homo Sapien
EVQLVESGGGLVKPGGSLRLSCAASGFTFSNAWMSWVRQAPGKGLEWVGRIKSKTNGGTTDYAAPVKGRFTISRDDSKNTLYLQMNSLKTEDTAVYYCTIDPLYDILTGPWGQGTLVTVSS

SEQ ID NO: 702 - DNA, 363 bp, Homo Sapien
gaggtgcagctggtggagtctgggggaggcttggtaaagcctggggggtcccttagactctcctgtgcagcctctggattcacttttagtaacgcctggatgagctgggtccgccaggctccagggaaggggctggagtgggttggccgtattaaaagcaaaactaatggtgggacaacagactacgctgcacccgtgaaaggcagattcaccatctcaagagatgattcaaaaaacacgctgtatctgcaaatgaacagcctgaaaaccgaggacacagccgtgtattactgtaccatagaccccctctacgatattttgactggtccctggggccagggaaccctggtcaccgtctcctca

SEQ ID NO: 703 - protein, 106 aa, Homo Sapien
SYELTQPPSVSVSPGQTASITCSGDKLGDKYACWYQQKPGQSPVLVIYQDSKRPSGIPERFSGSNSGNTATLTISGTQAMDEADYYCQAWDSSTVVFGGGTKLTVL

SEQ ID NO: 704 - DNA, 318 bp, Homo Sapien
tcctatgagctgactcagccaccctcagtgtccgtgtccccaggacagacagccagcatcacctgctctggagataaattgggggataaatatgcttgctggtatcagcagaagccaggccagtcccctgtgctggtcatctatcaagatagcaagcggccctcagggatccctgagcgattctctggctccaattctgggaacacagccactctgaccatcagcgggacccaggctatggatgaggctgactattactgtcaggcgtgggacagcagcactgtggtattcggcggagggaccaagctgaccgtccta

SEQ ID NO: 705 - protein, 121 aa, Homo Sapien
EVQLVESGGGLVKPGGSLRLSCAASGFTFSYAWMSWVRQAPGKGLEWVGRIKSKTNGGTTDYAAPVKGRFTISRDDSKNTLYLQMNSLKTEDTAVYYCTTDPLYDILTGLWGQGTLVTVSS

SEQ ID NO: 706 - DNA, 363 bp, Homo Sapien
gaggtgcagctggtggagtctgggggaggcttggtaaagcctggggggtcccttagactctcctgtgcagcctctggattcactttcagttacgcctggatgagctgggtccgccaggctccagggaaggggctggagtgggttggccgtatcaaaagcaaaactaatggtgggacaacagactacgctgcacccgtgaaaggcagattcaccatctcaagagatgattcaaaaaacacgctgtatctgcaaatgaacagcctgaaaaccgaggacacagccgtgtattactgtaccacagaccccctctacgatattttgactggtctatggggccagggaaccctggtcaccgtctcctca

SEQ ID NO: 707 - protein, 106 aa, Homo Sapien
SYELTQPPSMSVSPGQTASITCSGDKLGDKYACWYQQKPGQSPVLVIYQDSKRPSGIPERFSGSNSGNTATLTISGTQAMDESDYYCQAWDSSTVVFGGGTKLTVL

SEQ ID NO: 708 - DNA, 318 bp, Homo Sapien
tcctatgaactgactcagccaccctcaatgtccgtgtccccaggacagacagccagcatcacctgctctggagataaattgggggataaatatgcttgctggtatcagcagaagccaggccagtcccctgtgctggtcatctatcaagatagcaagcggccctcagggatccctgagcgattctctggctccaactctgggaacacagccactctgaccatcagcgggacccaggctatggatgagtctgactattactgtcaggcgtgggacagcagcactgtggtattcggcggagggaccaaactgaccgtccta

SEQ ID NO: 709 - protein, 121 aa, Homo Sapien; identical to SEQ ID NO: 623

SEQ ID NO: 710 - DNA, 363 bp, Homo Sapien; identical to SEQ ID NO: 624

SEQ ID NO: 711 - protein, 107 aa, Homo Sapien
DIQMTQSPSSLSASVGDRVTITCRASQNIKSYLTWYQQKPGKAPKLLIYTASSLQSGVPSRFSGSGSGTDFTLTISSLQPEDFATYYCQQSYSIPCSFGQGTKLEIK

SEQ ID NO: 712 - DNA, 321 bp, Homo Sapien
gacatccagatgacccagtctccatcctccctgtctgcatctgtaggagacagagtcaccatcacttgccgggcaagtcagaacattaagagttatttaacttggtatcagcagaaaccagggaaagcccctaagctcctgatctatactgcatccagtttacaaagtggggtcccatcaaggttcagtggcagtggatctgggacagatttcactctcaccatcagcagtctgcaacctgaagattttgcaacttattactgtcaacagagttacagtatcccgtgcagttttggccaggggaccaagctggagatcaaa

SEQ ID NO: 713 - protein, 122 aa, Homo Sapien
EVQLEESGGGLVKPGGSLRLSCAASGFTFSNAWMSWVRQAPGKGLEWVGRIKSKTNGGTRDYAAPVKGRFTISRDDSKNTLYLQMNSLKTEDTAVYYCTTDPPLYDLLTGHWGQGTLVTVSS

SEQ ID NO: 714 - DNA, 366 bp, Homo Sapien
gaggtgcagctggaggagtctgggggaggcttggtaaagccgggggggtcccttagactctcctgtgcagcctctggattcactttcagtaacgcctggatgagctgggtccgccaggctccagggaaggggctggagtgggttggccgtattaaaagcaaaactaatggtgggacaagagactatgctgcacccgtgaaaggcagattcaccatctcaagagatgattcaaaaaacacgctgtatctgcaaatgaacagcctgaaaaccgaggacacagccgtgtattactgtaccacagatccccccctttacgatcttttgactggccattggggccagggaaccctggtcaccgtctcctca

SEQ ID NO: 715 - protein, 106 aa, Homo Sapien
SYELTQPPSVSVSPGQTASITCSGDKLGDKYACWYQQKPGQSPVLVIYQDSKRPSGIPERFSGSNSGNTATLTISGTQAMDEADYYCQAWDSNTAVFGAGTKVTVL

SEQ ID NO: 716 - DNA, 318 bp, Homo Sapien
tcctatgaactgactcagccaccctcagtgtccgtgtccccaggacagacagccagcatcacctgctctggagataaattgggggataaatatgcttgctggtatcagcagaagccaggccagtcccctgtgctggtcatctatcaagatagtaagcggccctcagggatccctgagcgattctctggctccaactctgggaacacagccactctgaccatcagcgggacccaggctatggatgaggctgactattactgtcaggcctgggacagcaacactgctgtcttcggagctgggaccaaggtcaccgtccta

SEQ ID NO: 717 - protein, 122 aa, Homo Sapien
EVQLVESGGGLVKPGGSLRLSCAASGFTFSNVWMSWVRQAPGKGLEWVGRIKSKSNGGTTDNSAPVKGRFTISRDDSKNTLYLQMNSLKTEDTAVYYCTTDPPLYDILTGHWGQGTLVIVSS

SEQ ID NO: 718 - DNA, 366 bp, Homo Sapien
gaggtgcagctggtggagtctgggggaggcttggtaaagcctggggggtcccttagactctcctgtgcagcctctggattcactttcagtaacgtctggatgagctgggtccgccaggctccagggaaggggctggagtgggttggccgtattaaaagtaaaagtaatggtgggacaacagacaactctgcacccgtgaaaggcagattcaccatttcaagagatgattcaaaaaacacgctgtatctgcaaatgaacagcctgaaaaccgaggacacagccgtgtattactgtaccacagatccccccctttacgatattttgactggccattggggccagggaaccctggtcattgtctcctca

SEQ ID NO: 719 - protein, 106 aa, Homo Sapien
SYELTQPPSVSVSPGQTASITCSGDKLGDKYACWYQQKPGQSPVLVIYQDNKRPSGIPERFSGSNSGNTATLTISGTQAMDEADYYCQAWDSSTAVFGTGTKVTVL

SEQ ID NO: 720 - DNA, 318 bp, Homo Sapien
tcctatgaattgactcagccaccctcagtgtccgtgtccccaggacagacagccagcatcacctgctctggagataaattgggggataaatatgcttgctggtatcagcagaagccaggccagtcccctgtgctggtcatctatcaggataacaagcggccctcagggatccctgagcgattctctggctccaactctgggaacacagccactctgaccatcagcgggacccaggctatggatgaggctgactattactgtcaggcgtgggacagcagcactgctgtcttcggaactgggaccaaggtcaccgtccta

SEQ ID NO: 721 - protein, 121 aa, Homo Sapien
EVQLVESGGGLVQPGRSLRLSCAASGFTFDDYAMHWVRQTPGKGLEWVSGISWNSITIGYADSVKGRFTLSRDNAKNSLYLQMNSLIAEDTALYYCAKDGGSLRYYGMDVWGQGTTVTVSS

SEQ ID NO: 722 - DNA, 363 bp, Homo Sapien
gaagtgcagttggtggagtctgggggaggcttggtacagcctggcaggtccctgagactctcctgtgcagcctctggattcacctttgatgattatgccatgcactgggtccggcaaactccagggaagggcctggagtgggtctcaggtattagttggaatagtatcaccataggctatgcggactctgtgaagggccgattcaccctgtccagagacaacgccaagaactccctgtatctgcaaatgaacagtctgatagctgaggacacggccttgtattactgtgcaaaagatggtggttcacttcgctactacggtatggacgtctggggccaagggaccacggtcaccgtctcctca

SEQ ID NO: 723 - protein, 112 aa, Homo Sapien
DIVMTQSPLSLPVTPGEPASISCRSSQSLLHSNGYNYLNWYLQKAGQSPQLLIYLGSNRASGVPDRFSGSGSGTDFTLKISRVEAEDVGVFYCMQALQTPLTFGGGTKVEIK

SEQ ID NO: 724 - DNA, 336 bp, Homo Sapien
gatattgtgatgactcagtctccactctccctgcccgtcacccctggagagccggcctccatctcctgcaggtctagtcagagcctcctgcatagtaatggatacaactatttgaattggtacctgcagaaggcagggcagtctccacagctcctgatctatttgggttctaatcgggcctccggggtccctgacaggttcagtggcagtggatcaggcacagattttacactgaaaatcagcagagtggaggctgaggatgttggggttttttactgcatgcaagctctacaaactccgctcactttcggcggagggactaaggtggagatcaaa

SEQ ID NO: 725 - protein, 121 aa, Homo Sapien
EVQLVESGGGLVQPGRSLRLSCTASGFSFDDYAMHWVRQVPGKGLEWVSGISWNSITIGYADSVKGRFTISRDNAKNSLYLQMNSLRAEDTALYFCAKDGGNRKYYGMDVWGQGTTVTVSS

SEQ ID NO: 726 - DNA, 363 bp, Homo Sapien
gaagtgcagctggtggagtctgggggaggcttggtccagcctggcaggtccctgagactctcctgtacagcctctggattctcctttgatgattatgccatgcactgggtccggcaagttccagggaagggcctggagtgggtctcaggtattagttggaatagtattaccattggctatgcggactctgtgaagggccgattcaccatctccagagacaacgccaagaactccctctatctgcaaatgaacagtctgagagctgaggacacggccttgtatttctgtgcaaaagatggggggaataggaaatactatggtatggacgtctggggccaagggaccacggtcaccgtctcctca

SEQ ID NO: 727 - protein, 112 aa, Homo Sapien
DIVMTQSPLSLPVTPGEPASISCRSSQSLLHSNGYNYLDWYLQKPGQSPHLLIYLGSNRASGVPDRFSGSGSGTDFTLKISRVEADDVGVYFCLQALQTPCSFGQGTKLEIK

SEQ ID NO: 728 - DNA, 336 bp, Homo Sapien
gatattgtgatgactcagtctccactctccctgcccgtcacccctggagagccggcctccatctcctgcaggtctagtcagagcctcctgcatagtaatggatacaactatttggattggtacctgcagaagccagggcagtctccacacctcctgatctatttgggttctaatcgggcctccggggtccctgacaggttcagtggcagtggatcaggcacagattttacactgaaaatcagcagagtggaggctgacgatgttggggtttatttctgcttgcaagctctacaaactccgtgcagttttggccaggggaccaagctggagatcaaa

SEQ ID NO: 729 - protein, 121 aa, Homo Sapien
EVQLVESGGGLVQPGRSLRLSCAASGFTFDDYAMHWVRQAPGKGLEWVSGISWNSITIGYADSVKGRFTISRDNAKNSLYLQMNSLRAEDTALYYCTKDGGNRRYYGVDVWGQGTTVTVSS

SEQ ID NO: 730 - DNA, 363 bp, Homo Sapien
gaagtgcagctggtggagtctgggggaggcttggtacagcctggcaggtccctgagactctcctgtgcagcctctggattcacctttgatgattatgccatgcactgggtccggcaagctccagggaagggcctggagtgggtctcaggtattagttggaatagtattaccataggctatgcggactctgtgaagggccgattcaccatctccagagacaacgccaagaactccctctatctgcaaatgaacagtctgagagctgaggacacggccttgtattactgtacaaaagatggggggaataggagatactacggtgtggacgtctggggccaagggaccacggtcacagtctcctca

SEQ ID NO: 731 - protein, 112 aa, Homo Sapien
DIVMTQSPLSLPVTPGEPASISCRSSQSLLHSNGYNYLDWYLQKPGQSPQLLIYLGSNRASGVPDRFSGSGSGTDFTLKISRVEAEDVGVYYCMQALQTPCSFGQGTKLEIK

SEQ ID NO: 732 - DNA, 336 bp, Homo Sapien
gatattgtgatgactcagtctccactctccctgcccgtcacccctggagagccggcctccatctcctgcaggtctagtcagagcctcctgcatagtaatggatacaactatttggattggtacctgcagaagccagggcagtctccacagctcctgatctatttgggttctaatcgggcctccggggtccctgacaggttcagtggcagtggatcaggcacagattttacactgaaaatcagcagagtggaggctgaggatgttggggtttattactgcatgcaagctctacaaactccgtgcagttttggccaggggaccaagctggagatcaaa

SEQ ID NO: 733 - protein, 121 aa, Homo Sapien
EVQLVESGGGLVQPGRSLRLSCAASGFTFDDYAMHWVRQAPGKGLEWVSGISWNSINIGYADSVKGRFTISRDNAKNSLYLQMNSLRAEDTALYYCAKDIPVKSYNGLDVWGQGTTVTVSS

SEQ ID NO: 734 - DNA, 363 bp, Homo Sapien
gaagtgcagctggtggagtctgggggaggcttggtacagcctggcaggtccctgagactctcctgtgcagcctctggattcacctttgacgattatgccatgcactgggtccggcaagctccagggaagggcctggagtgggtctcaggtattagctggaatagtattaacataggctatgcggactctgtgaagggccgattcaccatctccagagacaacgccaagaactccctgtatctgcaaatgaacagtctgagagctgaggacacggccttgtattactgtgcaaaagacatcccggtgaagtcctacaacggtttggacgtctggggccaagggaccacggtcaccgtctcctca

SEQ ID NO: 735 - protein, 112 aa, Homo Sapien
DIVMTQSPLSLPVTPGEPASISCRSSQSLLHSNGYNYLDWYLQKPGQSPQLLIYLGSNRASGVPDRFSGSGSGTDFTLKISRVEAEDVGVYYCMQALQTPLTFGGGTKVEIK

SEQ ID NO: 736 - DNA, 336 bp, Homo Sapien
gatattgtgatgactcagtctccactctccctgcccgtcacccctggagagccggcctccatctcctgcaggtctagtcagagcctcctgcatagtaatggatacaactatttggattggtacctgcagaagccagggcagtctccacagctcctgatctatttgggttctaatcgggcctccggggtccctgacaggttcagtggcagtggatcaggcacagattttacactgaaaatcagcagagtggaggctgaggatgttggggtttattactgcatgcaagctctacaaactccgctcactttcggcggagggaccaaggtggagatcaaa

SEQ ID NO: 737 - protein, 121 aa, Homo Sapien
EVQLVESGGGLVQPGGSLRLSCAASGFTFDDYGMYWVRQVPGKGLEWVSGISWNSISIGYADSVKGRFTISRDNAKNSLYLDMNTLRAEDTAMYYCAKDGGLKYYYGMDVWGQGTTVTVSS

SEQ ID NO: 738 - DNA, 363 bp, Homo Sapien
gaagtgcagttggtggagtctgggggaggcttggtacagcctggcgggtccctgagactctcctgtgcagcctctggattcacctttgacgattatggcatgtactgggtccggcaagttccagggaagggcctggagtgggtctcaggaattagttggaatagtattagtataggctatgcggactctgtgaagggccgattcaccatctccagagacaacgccaagaattccctgtatctggacatgaacacactgagagctgaggacacggccatgtattactgtgcaaaagatggtggcttgaaatactactacggtatggacgtctggggccaagggaccacggtcaccgtctcctca

SEQ ID NO: 739 - protein, 112 aa, Homo Sapien
DIVMTQSPLSLPVTPGEPASISCRSSQSLLHSNGYIYLAWYLHKPGQSPHLLIYLGSNRASGVPDRFSGSGSSTDFTLKISRVESEDVGIYYCMQALQTPLTFGGGTKVEIK

SEQ ID NO: 740 - DNA, 336 bp, Homo Sapien
gatattgtgatgactcagtctccactctccctgcccgtcacccctggagagccggcctccatctcctgcaggtctagtcagagcctcctgcatagtaatggatacatctatctggcttggtacctgcataagccaggacagtctccacatctcctgatctatttgggttctaatcgggcctccggggtccctgacaggttcagtggcagtggatcaagcacagattttacactgaaaatcagcagagtggagtctgaggatgttgggatttattactgcatgcaagctctacaaactccgctcactttcggcggagggaccaaggtggagatcaaa

SEQ ID NO: 741 - protein, 121 aa, Homo Sapien
QVQLVESGGGLVKPGGSLRLSCAASGFIFSDYYMSWIRQAPGKGLEWISYSSSSGPTIYFADSVKGRFTISRDNAKKSLYLQMNSLRDEDTAVYYCAREGITMGRWGMDVWGQGTMVTVSS

SEQ ID NO: 742 - DNA, 363 bp, Homo Sapien
caggtgcagttggtggagtctgggggaggcttggtcaagcctggagggtccctgagactctcctgtgcagcctctggattcatcttcagtgactactacatgagttggatccgccaggctccagggaaggggctggagtggatttcatatagtagtagtagtggtcctaccatatacttcgcagactctgtgaagggccgattcaccatctccagggacaatgccaagaagtcattgtatctgcaaatgaacagcctgagagacgaggacacggccgtatattattgtgcgagagagggtatcactatgggccggtggggtatggacgtctggggccaagggaccatggtcaccgtctcatca

SEQ ID NO: 743 - protein, 105 aa, Homo Sapien
DMQMTQSPSTLSASVGDRVTITCRASQSISNWLAWYQQKPGKAPKLLIYKASNLESGVSSRFSGSGSGTEFTLTISSLQPDDVATYHCQQYNSYTFGGGTKVEIK

SEQ ID NO: 744 - DNA, 315 bp, Homo Sapien
gacatgcagatgacccagtctccttccaccctgtctgcatctgtaggagacagagtcaccatcacttgccgggccagtcagagtatcagtaactggttggcctggtatcagcagaaaccagggaaagcccctaaactcctgatctataaggcgtctaatttagaaagtggggtctcatcaaggttcagcggcagtggatctgggacagaattcactctcaccatcagcagcctgcagcctgatgatgttgcaacttatcactgccaacagtataatagttatactttcggcggagggaccaaggtggagatcaaa

SEQ ID NO: 745 - protein, 120 aa, Homo Sapien
EVQLVESGGSVVRPGGSLRLSCAASGFSFDASGMSWIRQAPGKGLEWVSGINYIGGSTGYADSVKGRFTISRDNAKNSLYLQMNSLRADDTALYYCAREVYSSTWYDDYWGQGTLVTVSS

SEQ ID NO: 746 - DNA, 360 bp, Homo Sapien
gaggtgcagctggtggagtctgggggaagtgttgtacggccgggggggtccctgagactctcctgtgcagcctctggattctcctttgatgcttctggcatgagctggatccgccaagctccagggaagggcctggagtgggtctctggtattaattacattggtggtagcacaggttatgcagactctgtgaagggccgattcaccatctccagagacaacgccaagaactccctgtatctccaaatgaacagtctgagagccgacgacacggccttgtattactgtgcgcgagaggtttatagcagcacctggtacgatgactactggggccagggaaccctggtcaccgtctcctca

SEQ ID NO: 747 - protein, 107 aa, Homo Sapien
DIQMTQSPSSLSTSVGDRVTITCRASQSINTYLNWYQQKSGKAPKLLIYAASSLRSGVPSRFSGSGSGTDFTLTINNLQPEDFATYYCQQSYRTPLTFGGGAKVEIK

SEQ ID NO: 748 - DNA, 321 bp, Homo Sapien
gacatccagatgacccagtctccttcctccctgtctacatctgtaggagacagagtcaccatcacttgccgggcaagtcagagcattaacacctatttaaattggtatcagcagaaatcagggaaagcccctaaactcctgatctatgctgcatccagtttgcgaagtggggttccatcaaggttcagtggcagtggatcggggacagatttcactctcaccatcaacaatctacaacctgaagattttgcaacttactactgtcaacagagttacaggaccccgctcactttcggcggaggggccaaggtggagatcaaa

SEQ ID NO: 749 - protein, 121 aa, Homo Sapien
EVQLVESGGGLVQPGRSLRLSCAASGFTFDDYAMHWVRQVPGKGLEWVSGISWNSITIGYAGSVKGRFTISRDNAKNSLYLQMNSLRVEDTALYYCSKDIGVMKYFGLDVWGQGTMVTVSS

SEQ ID NO: 750 - DNA, 363 bp, Homo Sapien
gaagtgcaactggtggagtctgggggaggcttggtacagcctggcaggtccctgagactctcctgtgcagcctctggattcacctttgatgattatgccatgcactgggtccggcaagttccagggaagggcctggagtgggtctcaggtattagttggaatagtattaccataggctatgcgggctctgtgaagggccgattcaccatctccagagacaacgccaaaaactccctgtatctacaaatgaacagtctgagagttgaggacacggccttatattactgttcaaaagatataggagtcatgaagtacttcggtttggacgtctggggccaagggaccatggtcaccgtctcctca

SEQ ID NO: 751 - protein, 112 aa, Homo Sapien
DIVMTQSPLSLPVTPGEPASISCRSSQSLLHSNGYNYLDWYLQKPGQSPQLLIHLGSIRASGVPDRFSGSGSGTDFTLKISRVEAEDVGVYNCMQALQTPLTFGGGTKVEIK

SEQ ID NO: 752 - DNA, 336 bp, Homo Sapien
gatattgtgatgactcagtctccgctctccctgcccgtcacccctggagagccggcctccatctcctgcaggtctagtcagagcctcctgcatagtaatggatacaactatttggattggtacctgcagaagccagggcagtctccacaactcctgatccatctgggttctattcgggcctccggggtccctgacaggttcagtggcagtggatcaggcacagattttacactgaaaatcagtagagtggaggctgaggatgttggggtttataactgcatgcaagctctacaaactccgctcactttcggcggagggaccaaggtggagatcaaa
